United States Patent Application Publication US 2026/0290502 A1, published September 24, 2026 (application 19/570,731).

The application's sequence listing, which the Patent Office published only in electronic form, follows.

SEQUENCE LISTING (1529 sequences)

SEQ ID NO: 1 - DNA, 137 bp, Homo sapiens
  misc_feature 1..137: note = Description of Unknown: target sequence
  source 1..137: mol_type = unassigned DNA
gcaaggaatatattaaattttttctttcttgcacagaattcaatgttaaacaagtatgttgccattctgtggaaggcattattttccccttccaaactttgaaactcaaaagttttctaagaaaaaaaatcaaatcc

SEQ ID NO: 2 - DNA, 150 bp, Homo sapiens
  misc_feature 1..150: note = Description of Unknown: target sequence
  source 1..150: mol_type = unassigned DNA
gcaaggaatatattaaattttttctttcttgcacagaattcaatgttaaacaagtatgttgccattctgtggaattaaaaaaaaaaaggcattattttccccttccaaactttgaaactcaaaagttttctaagaaaaaaaatcaaatcc

SEQ ID NO: 3 - DNA, 201 bp, Homo sapiens
  misc_feature 1..201: note = Description of Unknown: target sequence
  source 1..201: mol_type = unassigned DNA
atatagtgtcaggttaagcattattaggttaagttatagctatctgtggcaatagcaagcagtttcaagggatgaatccatagctcaaagcggggaataggacgtatagctctctcattttaatgtctctctgggcctgatgatttaaaagactcacactcctaagatgaaagttattttctcatctatgtaatgtgttaa

SEQ ID NO: 4 - DNA, 201 bp, Homo sapiens
  misc_feature 1..201: note = Description of Unknown: target sequence
  source 1..201: mol_type = unassigned DNA
atatagtgtcaggttaagcattattaggttaagttatagctatctgtggcaatagcaagcagtttcaagggatgaatccatagctcaaagcggggaataggatgtatagctctctcattttaatgtctctctgggcctgatgatttaaaagactcacactcctaagatgaaagttattttctcatctatgtaatgtgttaa

SEQ ID NO: 5 - DNA, 201 bp, Homo sapiens
  misc_feature 1..201: note = Description of Unknown: target sequence
  source 1..201: mol_type = unassigned DNA
taagaactgttaggtgactgacacatctaggaggaaaatgaggggtgtcctggcgcttagttcttcaaacccggtaggaataaggcaagcctggtctacaggaaaccatctgtcctgactccgggagggtaagatggacaagcaggtcattttcagctcctatttcagttgccctatggaacaggggtgattcaaactgta

SEQ ID NO: 6 - DNA, 201 bp, Homo sapiens
  misc_feature 1..201: note = Description of Unknown: target sequence
  source 1..201: mol_type = unassigned DNA
taagaactgttaggtgactgacacatctaggaggaaaatgaggggtgtcctggcgcttagttcttcaaacccggtaggaataaggcaagcctggtctacagggaaccatctgtcctgactccgggagggtaagatggacaagcaggtcattttcagctcctatttcagttgccctatggaacaggggtgattcaaactgta

SEQ ID NO: 7 - DNA, 199 bp, Homo sapiens
  misc_feature 1..199: note = Description of Unknown: target sequence
  source 1..199: mol_type = unassigned DNA
ctgcacagggccgggatccctgccctctgggagttgatgctcttggggtgggaggacacagatgcttcaggatcccttagtgcttcaggattctagagtctcagaatttccaagccaaggcttggagtgcctcagctgatgtcacagtggaggttctagcagagtgggtagcacatatgtgtcatgtccctctggtctg

SEQ ID NO: 8 - DNA, 201 bp, Homo sapiens
  misc_feature 1..201: note = Description of Unknown: target sequence
  source 1..201: mol_type = unassigned DNA
ctgcacagggccgggatccctgccctctgggagttgatgctcttggggtgggaggacacagatgcttcaggatcccttagtgcttcaggattctagagtctcttagaatttccaagccaaggcttggagtgcctcagctgatgtcacagtggaggttctagcagagtgggtagcacatatgtgtcatgtccctctggtctg

SEQ ID NO: 9 - DNA, 201 bp, Homo sapiens
  misc_feature 1..201: note = Description of Unknown: target sequence
  source 1..201: mol_type = unassigned DNA
gtgagactgcgtgtgcaggtgtgtgtggagggctgtggggagctgtgtgtggggggggtgtgtgtgtgaggttgggggctgtgtggggtgtgtgtgaggctgcgtgtggggagtgtgaggctgtgtgtgtgcgagggggactatgtgtgtcggatgatgtccctggctgtgtgtggggatgtgtgtgtgtgtgtgtgtgtg

SEQ ID NO: 10 - DNA, 201 bp, Homo sapiens
  misc_feature 1..201: note = Description of Unknown: target sequence
  source 1..201: mol_type = unassigned DNA
gtgagactgcgtgtgcaggtgtgtgtggagggctgtggggagctgtgtgtggggggggtgtgtgtgtgaggttgggggctgtgtggggtgtgtgtgaggctgtgtgtggggagtgtgaggctgtgtgtgtgcgagggggactatgtgtgtcggatgatgtccctggctgtgtgtggggatgtgtgtgtgtgtgtgtgtgtg

SEQ ID NO: 11 - DNA, 201 bp, Homo sapiens
  misc_feature 1..201: note = Description of Unknown: target sequence
  source 1..201: mol_type = unassigned DNA
ccaatacaggagcactcagattcataaagcaagtccttagagacctacaaagagacttagaactcccacacaataataatgggagacttcaacacctcactgccaacattagacagatagagacagaaagttaacaaggatatccaggaattgaactcaggaattgaactcagctctgcaccaagcggacctaatagacat

SEQ ID NO: 12 - DNA, 201 bp, Homo sapiens
  misc_feature 1..201: note = Description of Unknown: target sequence
  source 1..201: mol_type = unassigned DNA
ccaatacaggagcactcagattcataaagcaagtccttagagacctacaaagagacttagaactcccacacaataataatgggagacttcaacacctcactgtcaacattagacagatagagacagaaagttaacaaggatatccaggaattgaactcaggaattgaactcagctctgcaccaagcggacctaatagacat

SEQ ID NO: 13 - DNA, 201 bp, Homo sapiens
  misc_feature 1..201: note = Description of Unknown: target sequence
  source 1..201: mol_type = unassigned DNA
caagtgaaacaaccaactatggctgtaaggatcatgaaaaacagggaattcccccccagtttacacagacaacaaaaactaagtgtaggtcactatctcattgtacccatggattttaatttatagaggtgactgagtgatgacatagaaagaccaatgccatcgaaagaataatttattacttacaagtcctgggagaag

SEQ ID NO: 14 - DNA, 201 bp, Homo sapiens
  misc_feature 1..201: note = Description of Unknown: target sequence
  source 1..201: mol_type = unassigned DNA
caagtgaaacaaccaactatggctgtaaggatcatgaaaaacagggaattcccccccagtttacacagacaacaaaaactaagtgtaggtcactatctcattttacccatggattttaatttatagaggtgactgagtgatgacatagaaagaccaatgccatcgaaagaataatttattacttacaagtcctgggagaag

SEQ ID NO: 15 - DNA, 201 bp, Homo sapiens
  misc_feature 1..201: note = Description of Unknown: target sequence
  source 1..201: mol_type = unassigned DNA
cttttgtctcccaggcaagatgctattaggggtcacttcccatgtacggagaaaacaatcttcatggataataatgataaaaccttatggaatgcaaaaacaaccaaaatatgtattctcggatgactgcattagggccaagtcaatattagtcccacttcacccacgcattgcatagtctaaaaatgctgtcagcctgat

SEQ ID NO: 16 - DNA, 201 bp, Homo sapiens
  misc_feature 1..201: note = Description of Unknown: target sequence
  source 1..201: mol_type = unassigned DNA
cttttgtctcccaggcaagatgctattaggggtcacttcccatgtacggagaaaacaatcttcatggataataatgataaaaccttatggaatgcaaaaacagccaaaatatgtattctcggatgactgcattagggccaagtcaatattagtcccacttcacccacgcattgcatagtctaaaaatgctgtcagcctgat

SEQ ID NO: 17 - DNA, 180 bp, Homo sapiens
  misc_feature 1..180: note = Description of Unknown: target sequence
  source 1..180: mol_type = unassigned DNA
caacgttttttagattcctcatatgagtgagatcatgctgtgaatctgtttctggctgatttcacttaggaggatgtcctccaagctcatccatgctgtcccaaaggctgaataatattccattgtatatatctctcacattttctttatccattcattcatcaacttagatttttttca

SEQ ID NO: 18 - DNA, 201 bp, Homo sapiens
  misc_feature 1..201: note = Description of Unknown: target sequence
  source 1..201: mol_type = unassigned DNA
caacgttttttagattcctcatatgagtgagatcatgctgtgaatctgtttctggctgatttcacttaggaggatgtcctccaagctcatccatgctgtcccaaagggcaagatctcctttttaaaggctgaataatattccattgtatatatctctcacattttctttatccattcattcatcaacttagatttttttca

SEQ ID NO: 19 - DNA, 201 bp, Homo sapiens
  misc_feature 1..201: note = Description of Unknown: target sequence
  source 1..201: mol_type = unassigned DNA
agagcaagataagtagaatccaaagcaatgatctgactgctcaaaatcaccgatattgacaactgactcccaaatccctgcttcatctaacatatattgctaataccatgcccagatagaacacaaagcaatatttattatatgacaaattctctccataattttagagagttttccctaaggaaagaaaggactttttaa

SEQ ID NO: 20 - DNA, 201 bp, Homo sapiens
  misc_feature 1..201: note = Description of Unknown: target sequence
  source 1..201: mol_type = unassigned DNA
agagcaagataagtagaatccaaagcaatgatctgactgctcaaaatcaccgatattgacaactgactcccaaatccctgcttcatctaacatatattgctactaccatgcccagatagaacacaaagcaatatttattatatgacaaattctctccataattttagagagttttccctaaggaaagaaaggactttttaa

SEQ ID NO: 21 - DNA, 201 bp, Homo sapiens
  misc_feature 1..201: note = Description of Unknown: target sequence
  source 1..201: mol_type = unassigned DNA
atattagtagacataaaaatcacctggggagagtgtaaaaaaataaaaattcccagaaattctggttcagtcattttggggccaacctagtcatttgcattaatcagcatgcactccctgatgattctgatataaatgaatcacatgttgcaaaatgctttagcctgttccctaatctaaatcttatctctctcctctcag

SEQ ID NO: 22 - DNA, 201 bp, Homo sapiens
  misc_feature 1..201: note = Description of Unknown: target sequence
  source 1..201: mol_type = unassigned DNA
atattagtagacataaaaatcacctggggagagtgtaaaaaaataaaaattcccagaaattctggttcagtcattttggggccaacctagtcatttgcattagtcagcatgcactccctgatgattctgatataaatgaatcacatgttgcaaaatgctttagcctgttccctaatctaaatcttatctctctcctctcag

SEQ ID NO: 23 - DNA, 201 bp, Homo sapiens
  misc_feature 1..201: note = Description of Unknown: target sequence
  source 1..201: mol_type = unassigned DNA
actcaagtgatcctcctgccttggcctcccaaagtgctaggattacaggcatgagccactgcgcctggcccagttacttattttagaagttatatttgagcacctattctgtgccgagccctggcatgagctgtgaacaggccatatctatcctagatgtgcactaatggggctttggagggtggcaacaggaggcccggt

SEQ ID NO: 24 - DNA, 201 bp, Homo sapiens
  misc_feature 1..201: note = Description of Unknown: target sequence
  source 1..201: mol_type = unassigned DNA
actcaagtgatcctcctgccttggcctcccaaagtgctaggattacaggcatgagccactgcgcctggcccagttacttattttagaagttatatttgagcatctattctgtgccgagccctggcatgagctgtgaacaggccatatctatcctagatgtgcactaatggggctttggagggtggcaacaggaggcccggt

SEQ ID NO: 25 - DNA, 201 bp, Homo sapiens
  misc_feature 1..201: note = Description of Unknown: target sequence
  source 1..201: mol_type = unassigned DNA
cttaaatgcaaatggtaaatctgaggcagcagtaaggtagagtggaaaggctttaggggaaaaaaaataaagtctgagaaactgtcacagcaagaggaccctaaggagacatgacaagtaaatgtaatatggtgtcctggatggcatcctggaaaagaaaagggacattagataaaaacaaaccatggacttcaataataa

SEQ ID NO: 26 - DNA, 201 bp, Homo sapiens
  misc_feature 1..201: note = Description of Unknown: target sequence
  source 1..201: mol_type = unassigned DNA
cttaaatgcaaatggtaaatctgaggcagcagtaaggtagagtggaaaggctttaggggaaaaaaaataaagtctgagaaactgtcacagcaagaggaccctgaggagacatgacaagtaaatgtaatatggtgtcctggatggcatcctggaaaagaaaagggacattagataaaaacaaaccatggacttcaataataa

SEQ ID NO: 27 - DNA, 201 bp, Homo sapiens
  misc_feature 1..201: note = Description of Unknown: target sequence
  source 1..201: mol_type = unassigned DNA
gctagcaaaaggttcattgtcagagataacctaggtctgaggaagcagaggccaatagtttttacatgcatcagagtgttagacaataagatgcagtgtaaaagtgtttgttctcactgctaaccaaagacaggcaaattaagactattaaagtatccttttctacccactaaaataattttagagaaaatttaagattac

SEQ ID NO: 28 - DNA, 201 bp, Homo sapiens
  misc_feature 1..201: note = Description of Unknown: target sequence
  source 1..201: mol_type = unassigned DNA
gctagcaaaaggttcattgtcagagataacctaggtctgaggaagcagaggccaatagtttttacatgcatcagagtgttagacaataagatgcagtgtaaaggtgtttgttctcactgctaaccaaagacaggcaaattaagactattaaagtatccttttctacccactaaaataattttagagaaaatttaagattac

SEQ ID NO: 29 - DNA, 201 bp, Homo sapiens
  misc_feature 1..201: note = Description of Unknown: target sequence
  source 1..201: mol_type = unassigned DNA
atttcttaaatgggtacgttttgtttgtacccatctcaagacctttgagatagccattccacttgattttttttttttttttgagatggagtcttgccctgtcgccaggctggagtgcggtggcgtgatctcaactcaatgcaaccgctgattccctggttcaagtgattctcctgcctcagcctcccaagtagctgggat

SEQ ID NO: 30 - DNA, 201 bp, Homo sapiens
  misc_feature 1..201: note = Description of Unknown: target sequence
  source 1..201: mol_type = unassigned DNA
atttcttaaatgggtacgttttgtttgtacccatctcaagacctttgagatagccattccacttgattttttttttttttttgagatggagtcttgccctgttgccaggctggagtgcggtggcgtgatctcaactcaatgcaaccgctgattccctggttcaagtgattctcctgcctcagcctcccaagtagctgggat

SEQ ID NO: 31 - DNA, 201 bp, Homo sapiens
  misc_feature 1..201: note = Description of Unknown: target sequence
  source 1..201: mol_type = unassigned DNA
ataaagaagcttactgtggtcctgtagggcctaccatcctgtgttggtattgctccaaagataagcatttttgattaaattggagattgccctcatttggggcagggaggggggtgcttagtccagtgatttcacaagcattttggtctcaggacccttttttaactcttaaaatttgttgagaacagcaaataaattgtt

SEQ ID NO: 32 - DNA, 201 bp, Homo sapiens
  misc_feature 1..201: note = Description of Unknown: target sequence
  source 1..201: mol_type = unassigned DNA
ataaagaagcttactgtggtcctgtagggcctaccatcctgtgttggtattgctccaaagataagcatttttgattaaattggagattgccctcatttggggtagggaggggggtgcttagtccagtgatttcacaagcattttggtctcaggacccttttttaactcttaaaatttgttgagaacagcaaataaattgtt

SEQ ID NO: 33 - DNA, 201 bp, Homo sapiens
  misc_feature 1..201: note = Description of Unknown: target sequence
  source 1..201: mol_type = unassigned DNA
ctcccggagtagctctgggagcaaggccctccctggatccctccctctttcccggtgtgcctgtctttcccgctccatcctccagcctccaccgggaggaacacggctgcattgttcctcaggaggaggccctgcctcggggcctggcccagtgcccaggtggggggccaggaacaaaactctgagatcgaggggcggggt

SEQ ID NO: 34 - DNA, 201 bp, Homo sapiens
  misc_feature 1..201: note = Description of Unknown: target sequence
  source 1..201: mol_type = unassigned DNA
ctcccggagtagctctgggagcaaggccctccctggatccctccctctttcccggtgtgcctgtctttcccgctccatcctccagcctccaccgggaggaacgcggctgcattgttcctcaggaggaggccctgcctcggggcctggcccagtgcccaggtggggggccaggaacaaaactctgagatcgaggggcggggt

SEQ ID NO: 35 - DNA, 201 bp, Homo sapiens
  misc_feature 1..201: note = Description of Unknown: target sequence
  source 1..201: mol_type = unassigned DNA
agaatctgattaataattgcccagtagggaccagttcctgggtcctgctgagcggaggggagggagttctgggctggttctggctggccagccgaggagaggagaggagcaaaggtgactttgagctgcagagggtggccgctggggcccagagctggcagatcccagcggctggcctccttccatgcttccctggtggct

SEQ ID NO: 36 - DNA, 201 bp, Homo sapiens
  misc_feature 1..201: note = Description of Unknown: target sequence
  source 1..201: mol_type = unassigned DNA
agaatctgattaataattgcccagtagggaccagttcctgggtcctgctgagcggaggggagggagttctgggctggttctggctggccagccgaggagaggggaggagcaaaggtgactttgagctgcagagggtggccgctggggcccagagctggcagatcccagcggctggcctccttccatgcttccctggtggct

SEQ ID NO: 37 - DNA, 193 bp, Homo sapiens
  misc_feature 1..193: note = Description of Unknown: target sequence
  source 1..193: mol_type = unassigned DNA
accaaaagtatgctctggctggattgcagctactcaaaaggagaaggaactgggatgaggctagagatgtagtcagaccctataaattttttttttttttttgagcattgagacctcaggaacaggttttaatgggtgtttgctggtggaggagagggtggagtgacttaacatgatgagacttactgtgttg

SEQ ID NO: 38 - DNA, 194 bp, Homo sapiens
  misc_feature 1..194: note = Description of Unknown: target sequence
  source 1..194: mol_type = unassigned DNA
accaaaagtatgctctggctggattgcagctactcaaaaggagaaggaactgggatgaggctagagatgtagtcagaccctataaatttttttttttttttttgagcattgagacctcaggaacaggttttaatgggtgtttgctggtggaggagagggtggagtgacttaacatgatgagacttactgtgttg

SEQ ID NO: 39 - DNA, 195 bp, Homo sapiens
  misc_feature 1..195: note = Description of Unknown: target sequence
  source 1..195: mol_type = unassigned DNA
accaaaagtatgctctggctggattgcagctactcaaaaggagaaggaactgggatgaggctagagatgtagtcagaccctataaattttttttttttttttttgagcattgagacctcaggaacaggttttaatgggtgtttgctggtggaggagagggtggagtgacttaacatgatgagacttactgtgttg

SEQ ID NO: 40 - DNA, 196 bp, Homo sapiens
  misc_feature 1..196: note = Description of Unknown: target sequence
  source 1..196: mol_type = unassigned DNA
accaaaagtatgctctggctggattgcagctactcaaaaggagaaggaactgggatgaggctagagatgtagtcagaccctataaatttttttttttttttttttgagcattgagacctcaggaacaggttttaatgggtgtttgctggtggaggagagggtggagtgacttaacatgatgagacttactgtgttg

SEQ ID NO: 41 - DNA, 201 bp, Homo sapiens
  misc_feature 1..201: note = Description of Unknown: target sequence
  source 1..201: mol_type = unassigned DNA
ggacctgagcggtagccttggtccactgcagacatcagcaagttcttagatcaggcggggaaccggtccacccactcatgctctggtttagctccctactctgctttctgagagtcagtttggaagggaacctagcggagctcctcagagtctcagggtccttgtctttgatgaactttctgcttggtcataggcagcctc

SEQ ID NO: 42 - DNA, 201 bp, Homo sapiens
  misc_feature 1..201: note = Description of Unknown: target sequence
  source 1..201: mol_type = unassigned DNA
ggacctgagcggtagccttggtccactgcagacatcagcaagttcttagatcaggcggggaaccggtccacccactcatgctctggtttagctccctactcttctttctgagagtcagtttggaagggaacctagcggagctcctcagagtctcagggtccttgtctttgatgaactttctgcttggtcataggcagcctc

SEQ ID NO: 43 - DNA, 201 bp, Homo sapiens
  misc_feature 1..201: note = Description of Unknown: target sequence
  source 1..201: mol_type = unassigned DNA
aaaatgcgtagcatggctcctgtaactacgagagctccacaaatgcaaactatatgacaagtgaggaacattagatgacagtcatgcttcgatttaagtaaagttaattgtaaaaatataaacttcctagaggaagttgttcttcgttcctgcggctgttgttctaacaagttaattcctttggtggatttccagtaagat

SEQ ID NO: 44 - DNA, 201 bp, Homo sapiens
  misc_feature 1..201: note = Description of Unknown: target sequence
  source 1..201: mol_type = unassigned DNA
aaaatgcgtagcatggctcctgtaactacgagagctccacaaatgcaaactatatgacaagtgaggaacattagatgacagtcatgcttcgatttaagtaaatttaattgtaaaaatataaacttcctagaggaagttgttcttcgttcctgcggctgttgttctaacaagttaattcctttggtggatttccagtaagat

SEQ ID NO: 45 - DNA, 201 bp, Homo sapiens
  misc_feature 1..201: note = Description of Unknown: target sequence
  source 1..201: mol_type = unassigned DNA
ctgtccagtcaggcagcgcgccagtcagccttcctccgtttgctgtttcacctttccaatccctcattttcacccattggctcctaatgtgggacactgctgagggctttggttttctacctcagtgagcgttcaacagtctgttttgacgccttgcttttagagccaggtttaacaaagcaaggcatggaatcattttcc

SEQ ID NO: 46 - DNA, 201 bp, Homo sapiens
  misc_feature 1..201: note = Description of Unknown: target sequence
  source 1..201: mol_type = unassigned DNA
ctgtccagtcaggcagcgcgccagtcagccttcctccgtttgctgtttcacctttccaatccctcattttcacccattggctcctaatgtgggacactgctgtgggctttggttttctacctcagtgagcgttcaacagtctgttttgacgccttgcttttagagccaggtttaacaaagcaaggcatggaatcattttcc

SEQ ID NO: 47 - DNA, 201 bp, Homo sapiens
  misc_feature 1..201: note = Description of Unknown: target sequence
  source 1..201: mol_type = unassigned DNA
tttggatttcctcttggctgtgttcatatcaatttatctcaccccacaccccacagtacttggtgtaccagttctggaactactggtatttattgctgtgccaaggaggcccattgcacaagtcctcctaaaagaggccattgtctcgatcactttaacatctccgccctggggagcttcaggctgagagatgggcctaac

SEQ ID NO: 48 - DNA, 201 bp, Homo sapiens
  misc_feature 1..201: note = Description of Unknown: target sequence
  source 1..201: mol_type = unassigned DNA
tttggatttcctcttggctgtgttcatatcaatttatctcaccccacaccccacagtacttggtgtaccagttctggaactactggtatttattgctgtgccgaggaggcccattgcacaagtcctcctaaaagaggccattgtctcgatcactttaacatctccgccctggggagcttcaggctgagagatgggcctaac

SEQ ID NO: 49 - DNA, 201 bp, Homo sapiens
  misc_feature 1..201: note = Description of Unknown: target sequence
  source 1..201: mol_type = unassigned DNA
atttttgctttttttttttttttttttttttgtggagagggtgtttctccatgttgcccaggctggtctcaaactcctgagctcaagagatctgcctgcctcagcctcccaaagtgctaggattataggcatgagctactgcgcctgcccagagcctgcattctttacctttacagtctagaccctgctcctatagatccc

SEQ ID NO: 50 - DNA, 201 bp, Homo sapiens
  misc_feature 1..201: note = Description of Unknown: target sequence
  source 1..201: mol_type = unassigned DNA
atttttgctttttttttttttttttttttttgtggagagggtgtttctccatgttgcccaggctggtctcaaactcctgagctcaagagatctgcctgcctcggcctcccaaagtgctaggattataggcatgagctactgcgcctgcccagagcctgcattctttacctttacagtctagaccctgctcctatagatccc

SEQ ID NO: 51 - DNA, 201 bp, Homo sapiens
  misc_feature 1..201: note = Description of Unknown: target sequence
  source 1..201: mol_type = unassigned DNA
tggaacaaaggtggtgcttatgggatgtatggagctgtgggatgtgggagaggacaggtttagcagagtggcgtggtggaaagtttcctctcgccgaggaggacaactccccagcgcctgagacagcgggagctcagagcgcctagaatgtgcccagattctaaagtgaagcaggctgtggtgtgatgatggcccccgagg

SEQ ID NO: 52 - DNA, 201 bp, Homo sapiens
  misc_feature 1..201: note = Description of Unknown: target sequence
  source 1..201: mol_type = unassigned DNA
tggaacaaaggtggtgcttatgggatgtatggagctgtgggatgtgggagaggacaggtttagcagagtggcgtggtggaaagtttcctctcgccgaggaggccaactccccagcgcctgagacagcgggagctcagagcgcctagaatgtgcccagattctaaagtgaagcaggctgtggtgtgatgatggcccccgagg

SEQ ID NO: 53 - DNA, 201 bp, Homo sapiens
  misc_feature 1..201: note = Description of Unknown: target sequence
  source 1..201: mol_type = unassigned DNA
tgcctgtcttctgcaggggcctctgcacccacaggcttggtccacagctgcctcttggttgtccctccacctccctggcctttgagactccctcagtggcttcgtcagagttctctgagcccagctgtggaggagagtctgaaacagctgctctgggaggcggcagcaggagtgtcccagcgccgtgggctgggctggtgc

SEQ ID NO: 54 - DNA, 201 bp, Homo sapiens
  misc_feature 1..201: note = Description of Unknown: target sequence
  source 1..201: mol_type = unassigned DNA
tgcctgtcttctgcaggggcctctgcacccacaggcttggtccacagctgcctcttggttgtccctccacctccctggcctttgagactccctcagtggctttgtcagagttctctgagcccagctgtggaggagagtctgaaacagctgctctgggaggcggcagcaggagtgtcccagcgccgtgggctgggctggtgc

SEQ ID NO: 55 - DNA, 201 bp, Homo sapiens
  misc_feature 1..201: note = Description of Unknown: target sequence
  source 1..201: mol_type = unassigned DNA
aggcactgaagggtgaggctgtgtgccactccttgggctggctccagctgacagggttgtccacagtagaaaatgtgcctgtgggcagtggggtcggcccccagccccacgtgggaggatgaacaaccctcggcaccatgccatgcgctttgctcagattccccttcaggaaattactgatttggtttcttaggaattggc

SEQ ID NO: 56 - DNA, 201 bp, Homo sapiens
  misc_feature 1..201: note = Description of Unknown: target sequence
  source 1..201: mol_type = unassigned DNA
aggcactgaagggtgaggctgtgtgccactccttgggctggctccagctgacagggttgtccacagtagaaaatgtgcctgtgggcagtggggtcggcccccggccccacgtgggaggatgaacaaccctcggcaccatgccatgcgctttgctcagattccccttcaggaaattactgatttggtttcttaggaattggc

SEQ ID NO: 57 - DNA, 200 bp, Homo sapiens
  misc_feature 1..200: note = Description of Unknown: target sequence
  source 1..200: mol_type = unassigned DNA
ggagtctttcccccattgcttgcttttaattggctttgttgaagatgagatggttatagttgtgttttctgagttctttattctgtttcattggtctatgttttttttttgttttttttttttttgaaagtgtctcactctttaccaaggctggagtgtagtggcatgatcacagctcactgaagcctcagccttcaggg

SEQ ID NO: 58 - DNA, 201 bp, Homo sapiens
  misc_feature 1..201: note = Description of Unknown: target sequence
  source 1..201: mol_type = unassigned DNA
ggagtctttcccccattgcttgcttttaattggctttgttgaagatgagatggttatagttgtgttttctgagttctttattctgtttcattggtctatgttgttttttttgttttttttttttttgaaagtgtctcactctttaccaaggctggagtgtagtggcatgatcacagctcactgaagcctcagccttcaggg

SEQ ID NO: 59 - DNA, 201 bp, Homo sapiens
  misc_feature 1..201: note = Description of Unknown: target sequence
  source 1..201: mol_type = unassigned DNA
cccactcatgagaactctacccccatccaatcacctcccacttggtcccacctccaacatgggggattataactggacatgagatttagtggggacagagatacaaattatatcattccacccccagcccctccaaatttcatgtccttctcatattgcaaaatacaatcatcccttctcaacagtcccccaaagtcttat

SEQ ID NO: 60 - DNA, 201 bp, Homo sapiens
  misc_feature 1..201: note = Description of Unknown: target sequence
  source 1..201: mol_type = unassigned DNA
cccactcatgagaactctacccccatccaatcacctcccacttggtcccacctccaacatgggggattataactggacatgagatttagtggggacagagatccaaattatatcattccacccccagcccctccaaatttcatgtccttctcatattgcaaaatacaatcatcccttctcaacagtcccccaaagtcttat

SEQ ID NO: 61 - DNA, 201 bp, Homo sapiens
  misc_feature 1..201: note = Description of Unknown: target sequence
  source 1..201: mol_type = unassigned DNA
tttgacgagttgagagaagaaggcttcagatgatcaaactactccgagctacaggaggaaattcaaaccaaaggcaaagaagttcaaaactttgaaaaaaatgtagacgaatgtataattagaataaccaatacagaaaagtgcttaaaggagctgatggagctgaaagccaaggctggagaactacgtgaagaatgcaga

SEQ ID NO: 62 - DNA, 201 bp, Homo sapiens
  misc_feature 1..201: note = Description of Unknown: target sequence
  source 1..201: mol_type = unassigned DNA
tttgacgagttgagagaagaaggcttcagatgatcaaactactccgagctacaggaggaaattcaaaccaaaggcaaagaagttcaaaactttgaaaaaaatttagacgaatgtataattagaataaccaatacagaaaagtgcttaaaggagctgatggagctgaaagccaaggctggagaactacgtgaagaatgcaga

SEQ ID NO: 63 - DNA, 199 bp, Homo sapiens
  misc_feature 1..199: note = Description of Unknown: target sequence
  source 1..199: mol_type = unassigned DNA
gatccagattgtgaggtcatgaaatgcttatgaacagagagcttaagagtaactagacagaagaagaaagaatgttacttctgttaatatgaatagcatgtgagaaagccctgggtccatatggagcctgacctaatcaagacacataagaaagacctatgtgacaggagcgcaaaaaagtgaaggagaaaatggttgg

SEQ ID NO: 64 - DNA, 199 bp, Homo sapiens
  misc_feature 1..199: note = Description of Unknown: target sequence
  source 1..199: mol_type = unassigned DNA
gatccagattgtgaggtcatgaaatgcttatgaacagagagcttaagagtaactagacagaagaagaaagaatgttacttctgttaatatgaatagcatgtgcgaaagccctgggtccatatggagcctgacctaatcaagacacataagaaagacctatgtgacaggagcgcaaaaaagtgaaggagaaaatggttgg

SEQ ID NO: 65 - DNA, 199 bp, Homo sapiens
  misc_feature 1..199: note = Description of Unknown: target sequence
  source 1..199: mol_type = unassigned DNA
gatccagattgtgaggtcatgaaatgcttatgaacagagagcttaagagtaactagacagaagaagaaagaatgttacttctgttaatatgaatagcatgtgtgaaagccctgggtccatatggagcctgacctaatcaagacacataagaaagacctatgtgacaggagcgcaaaaaagtgaaggagaaaatggttgg

SEQ ID NO: 66 - DNA, 201 bp, Homo sapiens
  misc_feature 1..201: note = Description of Unknown: target sequence
  source 1..201: mol_type = unassigned DNA
tggtcatcaggggtccaagcttcttcattctgcctcaccatctcgcttgcagcttctgcctaatgttgacttacagttcaagatggcttctggagtgctaccattacatccatgttgtaggctagaaggaaaagggcaatggcctgaagaggaagggagagttcctgttaactcagcttcctttaaacagcctccccaaaa

SEQ ID NO: 67 - DNA, 201 bp, Homo sapiens
  misc_feature 1..201: note = Description of Unknown: target sequence
  source 1..201: mol_type = unassigned DNA
tggtcatcaggggtccaagcttcttcattctgcctcaccatctcgcttgcagcttctgcctaatgttgacttacagttcaagatggcttctggagtgctaccgttacatccatgttgtaggctagaaggaaaagggcaatggcctgaagaggaagggagagttcctgttaactcagcttcctttaaacagcctccccaaaa

SEQ ID NO: 68 - DNA, 200 bp, Homo sapiens
  misc_feature 1..200: note = Description of Unknown: target sequence
  source 1..200: mol_type = unassigned DNA
cagccttggactcctggtccaaagcaatcctcctgcttcagcctcctaagtggctgggagcacaggagcaagccatcacacttgactaatttttttttttttgagacagagtttcactcttgttgcccaggctgcagtgcaatggtgccatctcagctcactgaaacctctacttcccagattcgagcgattctcttgcc

SEQ ID NO: 69 - DNA, 201 bp, Homo sapiens
  misc_feature 1..201: note = Description of Unknown: target sequence
  source 1..201: mol_type = unassigned DNA
cagccttggactcctggtccaaagcaatcctcctgcttcagcctcctaagtggctgggagcacaggagcaagccatcacacttgactaattttttttttttttgagacagagtttcactcttgttgcccaggctgcagtgcaatggtgccatctcagctcactgaaacctctacttcccagattcgagcgattctcttgcc

SEQ ID NO: 70 - DNA, 201 bp, Homo sapiens
  misc_feature 1..201: note = Description of Unknown: target sequence
  source 1..201: mol_type = unassigned DNA
atcatttgaacataaatcagagtctcagtacaaacagagtgctcaggacatcaagatggttaaccagagagcctggccagaatatctgcggtggagagaaacaatcttgttgggagaaggatgacaataattggggacttagaataaaggctaaaaatgattcaaagagaatgcaaaaagaatcaggcacacatcctttac

SEQ ID NO: 71 - DNA, 201 bp, Homo sapiens
  misc_feature 1..201: note = Description of Unknown: target sequence
  source 1..201: mol_type = unassigned DNA
atcatttgaacataaatcagagtctcagtacaaacagagtgctcaggacatcaagatggttaaccagagagcctggccagaatatctgcggtggagagaaacgatcttgttgggagaaggatgacaataattggggacttagaataaaggctaaaaatgattcaaagagaatgcaaaaagaatcaggcacacatcctttac

SEQ ID NO: 72 - DNA, 153 bp, Homo sapiens
  misc_feature 1..153: note = Description of Unknown: target sequence
  source 1..153: mol_type = unassigned DNA
taagaagcatcctcaagctcccagttaagtaacttgactacttttatttgggaatttcagactatagaagctctcttatgtccagattctgtgaccactagttactgtatcagaactcatcaggtacccacttataaatagcactgatctggc

SEQ ID NO: 73 - DNA, 160 bp, Homo sapiens
  misc_feature 1..160: note = Description of Unknown: target sequence
  source 1..160: mol_type = unassigned DNA
taagaagcatcctcaagctcccagttaagtaacttgactacttttatttgggaatttcagactatagaagctctcttatgttttatgtccagattctgtgaccactagttactgtatcagaactcatcaggtacccacttataaatagcactgatctggc

SEQ ID NO: 74 - DNA, 201 bp, Homo sapiens
  misc_feature 1..201: note = Description of Unknown: target sequence
  source 1..201: mol_type = unassigned DNA
ctctgctccaggctctgggccgggcaccagcctctgggaaaatggagggggtggtggtgagggctcggacaaggagcagtgactccattccagggactctgtccagagggactgtcagcttaggacgtgcgcgaaacactcggttcacagggtttaacacactttagggtaaaacctgggagagcttcctaaggaggtgac

SEQ ID NO: 75 - DNA, 201 bp, Homo sapiens
  misc_feature 1..201: note = Description of Unknown: target sequence
  source 1..201: mol_type = unassigned DNA
ctctgctccaggctctgggccgggcaccagcctctgggaaaatggagggggtggtggtgagggctcggacaaggagcagtgactccattccagggactctgttcagagggactgtcagcttaggacgtgcgcgaaacactcggttcacagggtttaacacactttagggtaaaacctgggagagcttcctaaggaggtgac

SEQ ID NO: 76 - DNA, 201 bp, Homo sapiens
  misc_feature 1..201: note = Description of Unknown: target sequence
  source 1..201: mol_type = unassigned DNA
acaaaagaaacaaaagactgctactccataggcagagcagtcctgagagctgctcgtggcctatttttatggttttttttttaaatttttattttaggtttgggggtacatgtgaaggttttacatcggtaaacttgtgccacaggggtttgttgtacacattgtttcattacccaggtattaagcccagtatccgatagt

SEQ ID NO: 77 - DNA, 201 bp, Homo sapiens
  misc_feature 1..201: note = Description of Unknown: target sequence
  source 1..201: mol_type = unassigned DNA
acaaaagaaacaaaagactgctactccataggcagagcagtcctgagagctgctcgtggcctatttttatggttttttttttaaatttttattttaggtttgtgggtacatgtgaaggttttacatcggtaaacttgtgccacaggggtttgttgtacacattgtttcattacccaggtattaagcccagtatccgatagt

SEQ ID NO: 78 - DNA, 201 bp, Homo sapiens
  misc_feature 1..201: note = Description of Unknown: target sequence
  source 1..201: mol_type = unassigned DNA
tttcaaaaacgtggccacatccattttcccgccatcagctttccagaccacagaatgctctgcttttgagctgctcctcagctgacaccctccttgaatccactttgagttgctcttccctggccccattagaaaatgtcggctctgactacaccatgcttgcgaacaaaggtgcagaacaattttggctgcttcgtccag

SEQ ID NO: 79 - DNA, 201 bp, Homo sapiens
  misc_feature 1..201: note = Description of Unknown: target sequence
  source 1..201: mol_type = unassigned DNA
tttcaaaaacgtggccacatccattttcccgccatcagctttccagaccacagaatgctctgcttttgagctgctcctcagctgacaccctccttgaatccattttgagttgctcttccctggccccattagaaaatgtcggctctgactacaccatgcttgcgaacaaaggtgcagaacaattttggctgcttcgtccag

SEQ ID NO: 80 - DNA, 201 bp, Homo sapiens
  misc_feature 1..201: note = Description of Unknown: target sequence
  source 1..201: mol_type = unassigned DNA
cttctagaagcgtaaggtaacactggcattcctctagcctctgctggagtgcagtgaggattttctagcatgttgctgcactgttcccatgcacattattctaactttttagtaactcacacgtgcattcttttttcaacgctatccttagagtgaaagtcagaaaaaaatactagaaactaactcagggctgagcgtggt

SEQ ID NO: 81 - DNA, 201 bp, Homo sapiens
  misc_feature 1..201: note = Description of Unknown: target sequence
  source 1..201: mol_type = unassigned DNA
cttctagaagcgtaaggtaacactggcattcctctagcctctgctggagtgcagtgaggattttctagcatgttgctgcactgttcccatgcacattattctgactttttagtaactcacacgtgcattcttttttcaacgctatccttagagtgaaagtcagaaaaaaatactagaaactaactcagggctgagcgtggt

SEQ ID NO: 82 - DNA, 201 bp, Homo sapiens
  misc_feature 1..201: note = Description of Unknown: target sequence
  source 1..201: mol_type = unassigned DNA
ctgagctcccatctcacactgacatctacagagtcctatagcttccatcttggagtcccactctgccttctcagaaagccacaggtcaaatgaggctccgccgcacgcagaacaggggacctcctggacaggagtggcttttatccatccccacacccacagctcccagcgcagaccccgaagaattcatcccaggtgagt

SEQ ID NO: 83 - DNA, 201 bp, Homo sapiens
  misc_feature 1..201: note = Description of Unknown: target sequence
  source 1..201: mol_type = unassigned DNA
ctgagctcccatctcacactgacatctacagagtcctatagcttccatcttggagtcccactctgccttctcagaaagccacaggtcaaatgaggctccgcctcacgcagaacaggggacctcctggacaggagtggcttttatccatccccacacccacagctcccagcgcagaccccgaagaattcatcccaggtgagt

SEQ ID NO: 84 - DNA, 163 bp, Homo sapiens
  misc_feature 1..163: note = Description of Unknown: target sequence
  source 1..163: mol_type = unassigned DNA
ttctgacctcaagtgatccgcccgcctcggcctctgaaagtgctaggattgtaggcatgagccaccgcgcccggcctcgtacggtaattctgtgtgatgtttagggacacgtctcggagctggcgaactggacttggggtgggagggaaaggaagcattaaag

SEQ ID NO: 85 - DNA, 199 bp, Homo sapiens
  misc_feature 1..199: note = Description of Unknown: target sequence
  source 1..199: mol_type = unassigned DNA
ttctgacctcaagtgatccgcccgcctcggcctctgaaagtgctaggattgtaggcatgagccaccgcgcccggcctcgtacggtaattctgtgtgatgttttgaggaattgccacaattttttcctgcgcctgcaccagggacacgtctcggagctggcgaactggacttggggtgggagggaaaggaagcattaaag

SEQ ID NO: 86 - DNA, 201 bp, Homo sapiens
  misc_feature 1..201: note = Description of Unknown: target sequence
  source 1..201: mol_type = unassigned DNA
aactggctgcctctattccaaaaattatttagaaattttcagaatttaaactcattagcatggcttggaactttctcatccctaacgcaatccctgtgaccgatataatgatggtaatactaagagtaaaggggagagacagatcctactgattattaaaaagttatagtctgataatgaatgagtgttgtcaggaataga

SEQ ID NO: 87 - DNA, 201 bp, Homo sapiens
  misc_feature 1..201: note = Description of Unknown: target sequence
  source 1..201: mol_type = unassigned DNA
aactggctgcctctattccaaaaattatttagaaattttcagaatttaaactcattagcatggcttggaactttctcatccctaacgcaatccctgtgaccggtataatgatggtaatactaagagtaaaggggagagacagatcctactgattattaaaaagttatagtctgataatgaatgagtgttgtcaggaataga

SEQ ID NO: 88 - DNA, 201 bp, Homo sapiens
  misc_feature 1..201: note = Description of Unknown: target sequence
  source 1..201: mol_type = unassigned DNA
aaaccctgcgcactgtggttcacgccagcaatcccagccctttgggaggctaaggcaggtggatcacctgagtccaggagttcaagaccagccaggatgacacagcaaaacaccatctctactaataatacaaaaaccagctgtgaatggtgacacacagctgaagtagcagctactagggagactgaagcaggaggactg

SEQ ID NO: 89 - DNA, 201 bp, Homo sapiens
  misc_feature 1..201: note = Description of Unknown: target sequence
  source 1..201: mol_type = unassigned DNA
aaaccctgcgcactgtggttcacgccagcaatcccagccctttgggaggctaaggcaggtggatcacctgagtccaggagttcaagaccagccaggatgacatagcaaaacaccatctctactaataatacaaaaaccagctgtgaatggtgacacacagctgaagtagcagctactagggagactgaagcaggaggactg

SEQ ID NO: 90 - DNA, 200 bp, Homo sapiens
  misc_feature 1..200: note = Description of Unknown: target sequence
  source 1..200: mol_type = unassigned DNA
tgctatatccatctacatatataaagccaccgggagaactagtccacttggtgcagtcttctatactgtccttcacagcttagattcaatctttccttaaagtgtagccgggatacacaggagtgtgattctgggctgactcaaagttcttctcttgaaggctttttcctgtggcactggcagatggctgtgctatcttc

SEQ ID NO: 91 - DNA, 201 bp, Homo sapiens
  misc_feature 1..201: note = Description of Unknown: target sequence
  source 1..201: mol_type = unassigned DNA
tgctatatccatctacatatataaagccaccgggagaactagtccacttggtgcagtcttctatactgtccttcacagcttagattcaatctttccttaaagatgtagccgggatacacaggagtgtgattctgggctgactcaaagttcttctcttgaaggctttttcctgtggcactggcagatggctgtgctatcttc

SEQ ID NO: 92 - DNA, 201 bp, Homo sapiens
  misc_feature 1..201: note = Description of Unknown: target sequence
  source 1..201: mol_type = unassigned DNA
atttgctggagattgatgctgggaaaggaagcaaaatcttttgcaatctgtggttccttggttggacaagaaagagtcttctgccaggcctgaggatcttccagacactcacagtactcatggtacactggtcctagggaaggaaaacatgaaaaaggccgcactccattagcaagcaccacaacacagggagtcacttct

SEQ ID NO: 93 - DNA, 201 bp, Homo sapiens
  misc_feature 1..201: note = Description of Unknown: target sequence
  source 1..201: mol_type = unassigned DNA
atttgctggagattgatgctgggaaaggaagcaaaatcttttgcaatctgtggttccttggttggacaagaaagagtcttctgccaggcctgaggatcttccggacactcacagtactcatggtacactggtcctagggaaggaaaacatgaaaaaggccgcactccattagcaagcaccacaacacagggagtcacttct

SEQ ID NO: 94 - DNA, 201 bp, Homo sapiens
  misc_feature 1..201: note = Description of Unknown: target sequence
  source 1..201: mol_type = unassigned DNA
aatgactgacactctcaaattcccctctgcatcatgggcactcagcactgtgcctagtgcatagtaagacttcaacaaatatgtgctgttgttataattcggaatgacgatggaggtgcagaggtttacctgtgtttttattatctctggttgacaaggcggccacacccaggttgcctgttctgaagctgtctcaagaca

SEQ ID NO: 95 - DNA, 201 bp, Homo sapiens
  misc_feature 1..201: note = Description of Unknown: target sequence
  source 1..201: mol_type = unassigned DNA
aatgactgacactctcaaattcccctctgcatcatgggcactcagcactgtgcctagtgcatagtaagacttcaacaaatatgtgctgttgttataattcggcatgacgatggaggtgcagaggtttacctgtgtttttattatctctggttgacaaggcggccacacccaggttgcctgttctgaagctgtctcaagaca

SEQ ID NO: 96 - DNA, 201 bp, Homo sapiens
  misc_feature 1..201: note = Description of Unknown: target sequence
  source 1..201: mol_type = unassigned DNA
ggcatgcaccaccacgcccagctaaatttttttatttttagtagagatggggtttcaccatgttggcaaggctggtctcaaactcctgacttcatgatccacccgcctcggcctctcaaagtgctgggattacaggtgtgagccactgcaaccagcctgttttttgttttttttgagtaggatgtgatccgcttatgtttt

SEQ ID NO: 97 - DNA, 201 bp, Homo sapiens
  misc_feature 1..201: note = Description of Unknown: target sequence
  source 1..201: mol_type = unassigned DNA
ggcatgcaccaccacgcccagctaaatttttttatttttagtagagatggggtttcaccatgttggcaaggctggtctcaaactcctgacttcatgatccactcgcctcggcctctcaaagtgctgggattacaggtgtgagccactgcaaccagcctgttttttgttttttttgagtaggatgtgatccgcttatgtttt

SEQ ID NO: 98 - DNA, 201 bp, Homo sapiens
  misc_feature 1..201: note = Description of Unknown: target sequence
  source 1..201: mol_type = unassigned DNA
ttcacaggtgtttagaaaaattagattgtcacctcttgttggtcacagaatgattacaatactttgcattcgtgccacaatagtttttagagggtttttgtacgttatgtagctgagcattccatttggtctttggagcctgggggaagaggacctttaatgaggacaagaagataggaaagtgcaaaaatacaaatggag

SEQ ID NO: 99 - DNA, 201 bp, Homo sapiens
  misc_feature 1..201: note = Description of Unknown: target sequence
  source 1..201: mol_type = unassigned DNA
ttcacaggtgtttagaaaaattagattgtcacctcttgttggtcacagaatgattacaatactttgcattcgtgccacaatagtttttagagggtttttgtatgttatgtagctgagcattccatttggtctttggagcctgggggaagaggacctttaatgaggacaagaagataggaaagtgcaaaaatacaaatggag

SEQ ID NO: 100 - DNA, 201 bp, Homo sapiens
  misc_feature 1..201: note = Description of Unknown: target sequence
  source 1..201: mol_type = unassigned DNA
actgtgtgactctagtgatctttaacatacacagaatgatctacagtgatctttaacatactcagaaatatgaaaaatgtttgaatatgatctttagggactgctaatgaaaagggtatatgaaatgggaacaataaattctgtacatgtatacagtccatatacacattaagtgtttgtcatttggacaaattgaaaact

SEQ ID NO: 101 - DNA, 201 bp, Homo sapiens
  misc_feature 1..201: note = Description of Unknown: target sequence
  source 1..201: mol_type = unassigned DNA
actgtgtgactctagtgatctttaacatacacagaatgatctacagtgatctttaacatactcagaaatatgaaaaatgtttgaatatgatctttagggacttctaatgaaaagggtatatgaaatgggaacaataaattctgtacatgtatacagtccatatacacattaagtgtttgtcatttggacaaattgaaaact

SEQ ID NO: 102 - DNA, 201 bp, Homo sapiens
  misc_feature 1..201: note = Description of Unknown: target sequence
  source 1..201: mol_type = unassigned DNA
actagccatggacatgcaaattttaaaaacaatgagctactgttgctctcaattgggcaatatttttagaaaactgatagcatctaggccagcccttcccaaccgtctgcacctgggaatcgcctggggaccttcaagtaactactgatccccagctaccaatttaattggtttggggtatggcctggggttctacatttt

SEQ ID NO: 103 - DNA, 201 bp, Homo sapiens
  misc_feature 1..201: note = Description of Unknown: target sequence
  source 1..201: mol_type = unassigned DNA
actagccatggacatgcaaattttaaaaacaatgagctactgttgctctcaattgggcaatatttttagaaaactgatagcatctaggccagcccttcccaatcgtctgcacctgggaatcgcctggggaccttcaagtaactactgatccccagctaccaatttaattggtttggggtatggcctggggttctacatttt

SEQ ID NO: 104 - DNA, 201 bp, Homo sapiens
  misc_feature 1..201: note = Description of Unknown: target sequence
  source 1..201: mol_type = unassigned DNA
atcagtgttacagtgaaacaaagttattcaaggacctgctgctgtacatacttttgctaaaaatcagtttccaagaacctattgtggatgttaggagaggagctaccatgccacaatgactctgggagatgaagccattttattcccatgcttgttaaccttgtgcaggtgcgggaatgcagatggctgagtaggtcagat

SEQ ID NO: 105 - DNA, 201 bp, Homo sapiens
  misc_feature 1..201: note = Description of Unknown: target sequence
  source 1..201: mol_type = unassigned DNA
atcagtgttacagtgaaacaaagttattcaaggacctgctgctgtacatacttttgctaaaaatcagtttccaagaacctattgtggatgttaggagaggagttaccatgccacaatgactctgggagatgaagccattttattcccatgcttgttaaccttgtgcaggtgcgggaatgcagatggctgagtaggtcagat

SEQ ID NO: 106 - DNA, 201 bp, Homo sapiens
  misc_feature 1..201: note = Description of Unknown: target sequence
  source 1..201: mol_type = unassigned DNA
cctcccaaagtgttgggattacaggtatgagccaccacacccagctgcatgtggattcttaagtgcaacagtcagcagtaatctcacatctgttagcagacacttgctgtagtcacaacaatgctttcttcttccctgaacagatactccacttcttgaaatatacttaagtaggcactgtatttatacagctctgaaagc

SEQ ID NO: 107 - DNA, 201 bp, Homo sapiens
  misc_feature 1..201: note = Description of Unknown: target sequence
  source 1..201: mol_type = unassigned DNA
cctcccaaagtgttgggattacaggtatgagccaccacacccagctgcatgtggattcttaagtgcaacagtcagcagtaatctcacatctgttagcagacatttgctgtagtcacaacaatgctttcttcttccctgaacagatactccacttcttgaaatatacttaagtaggcactgtatttatacagctctgaaagc

SEQ ID NO: 108 - DNA, 201 bp, Homo sapiens
  misc_feature 1..201: note = Description of Unknown: target sequence
  source 1..201: mol_type = unassigned DNA
aggaaagattgattccaggaaaagggaccaaatgtcctaacacttttaaatgcctaacagaaaagtttttaccacagactaccatttttttctttctaaaggctgctacctttgaggcttcatctgcataacaagacagcttttgctcaccatgcctttcctcccctctccctcccataaagctgttgccacactccaagc

SEQ ID NO: 109 - DNA, 201 bp, Homo sapiens
  misc_feature 1..201: note = Description of Unknown: target sequence
  source 1..201: mol_type = unassigned DNA
aggaaagattgattccaggaaaagggaccaaatgtcctaacacttttaaatgcctaacagaaaagtttttaccacagactaccatttttttctttctaaaggttgctacctttgaggcttcatctgcataacaagacagcttttgctcaccatgcctttcctcccctctccctcccataaagctgttgccacactccaagc

SEQ ID NO: 110 - DNA, 201 bp, Homo sapiens
  misc_feature 1..201: note = Description of Unknown: target sequence
  source 1..201: mol_type = unassigned DNA
tctgtaactaccagattttactcgccttcctggactctgttcacaggaaagaaaggaaacaaacaaacctcatacattatgaagcatagggtatcaatggccctgctgattatagtgggtgggggtggcataaatacatgtacacccccactgctgccccatccccactcctctgagcactggggtcaaggaatatatatt

SEQ ID NO: 111 - DNA, 201 bp, Homo sapiens
  misc_feature 1..201: note = Description of Unknown: target sequence
  source 1..201: mol_type = unassigned DNA
tctgtaactaccagattttactcgccttcctggactctgttcacaggaaagaaaggaaacaaacaaacctcatacattatgaagcatagggtatcaatggccttgctgattatagtgggtgggggtggcataaatacatgtacacccccactgctgccccatccccactcctctgagcactggggtcaaggaatatatatt

SEQ ID NO: 112 - DNA, 201 bp, Homo sapiens
  misc_feature 1..201: note = Description of Unknown: target sequence
  source 1..201: mol_type = unassigned DNA
acacctgaggaaggctgggcagaatggatcgggggtgtgtattggctgcagtcacctcccctctgctcgtctgtgtccacattctgtcgtggttgagaccggatcctgtgtggaccgggtgggctggtgtggagtcctgtcaggagacctggggcggttttgaggcaagctcacggaggcctgccgcagggccctgcgctg

SEQ ID NO: 113 - DNA, 201 bp, Homo sapiens
  misc_feature 1..201: note = Description of Unknown: target sequence
  source 1..201: mol_type = unassigned DNA
acacctgaggaaggctgggcagaatggatcgggggtgtgtattggctgcagtcacctcccctctgctcgtctgtgtccacattctgtcgtggttgagaccggctcctgtgtggaccgggtgggctggtgtggagtcctgtcaggagacctggggcggttttgaggcaagctcacggaggcctgccgcagggccctgcgctg

SEQ ID NO: 114 - DNA, 201 bp, Homo sapiens
  misc_feature 1..201: note = Description of Unknown: target sequence
  source 1..201: mol_type = unassigned DNA
ttatcttcctaagacataaggcaattgctgacatttgccttcctcaagggccaaacagccaaccaacagtgtccttgggagcagagctgagtttctaaacctacggctagaaacatggagatccaaatccatatatggagatacttcacagaaggaaaaaaagcagaaataaactcttgggaaagaaagaatcagacccac

SEQ ID NO: 115 - DNA, 201 bp, Homo sapiens
  misc_feature 1..201: note = Description of Unknown: target sequence
  source 1..201: mol_type = unassigned DNA
ttatcttcctaagacataaggcaattgctgacatttgccttcctcaagggccaaacagccaaccaacagtgtccttgggagcagagctgagtttctaaacctgcggctagaaacatggagatccaaatccatatatggagatacttcacagaaggaaaaaaagcagaaataaactcttgggaaagaaagaatcagacccac

SEQ ID NO: 116 - DNA, 199 bp, Homo sapiens
  misc_feature 1..199: note = Description of Unknown: target sequence
  source 1..199: mol_type = unassigned DNA
cttcacaggtgaaattgtttgacccatgaaaatctgaaacatatgaggtctcttgttttcattcagcatatgccagttaagtgcctaattgttcacccagcaaccagatcctgactcacaattaattttatttatagagcctcactgctttgctgcttccctacttgttattttgactgtgggagcaaaaaatggtaac

SEQ ID NO: 117 - DNA, 199 bp, Homo sapiens
  misc_feature 1..199: note = Description of Unknown: target sequence
  source 1..199: mol_type = unassigned DNA
cttcacaggtgaaattgtttgacccatgaaaatctgaaacatatgaggtctcttgttttcattcagcatatgccagttaagtgcctaattgttcacccagcacccagatcctgactcacaattaattttatttatagagcctcactgctttgctgcttccctacttgttattttgactgtgggagcaaaaaatggtaac

SEQ ID NO: 118 - DNA, 199 bp, Homo sapiens
  misc_feature 1..199: note = Description of Unknown: target sequence
  source 1..199: mol_type = unassigned DNA
cttcacaggtgaaattgtttgacccatgaaaatctgaaacatatgaggtctcttgttttcattcagcatatgccagttaagtgcctaattgttcacccagcatccagatcctgactcacaattaattttatttatagagcctcactgctttgctgcttccctacttgttattttgactgtgggagcaaaaaatggtaac

SEQ ID NO: 119 - DNA, 201 bp, Homo sapiens
  misc_feature 1..201: note = Description of Unknown: target sequence
  source 1..201: mol_type = unassigned DNA
agtatgtaaggtgatgctaagagaagaggcacaaaagtattcacaattgggagggagacagatcccagggctccttgaagaggttctccctcactactcatgccctgcttatcacacacttgcacagttggatttcttttcaggtgtgcaaatatataagcttttaagtcatgaatagtatgtaccttatctgcactgttg

SEQ ID NO: 120 - DNA, 201 bp, Homo sapiens
  misc_feature 1..201: note = Description of Unknown: target sequence
  source 1..201: mol_type = unassigned DNA
agtatgtaaggtgatgctaagagaagaggcacaaaagtattcacaattgggagggagacagatcccagggctccttgaagaggttctccctcactactcatgtcctgcttatcacacacttgcacagttggatttcttttcaggtgtgcaaatatataagcttttaagtcatgaatagtatgtaccttatctgcactgttg

SEQ ID NO: 121 - DNA, 201 bp, Homo sapiens
  misc_feature 1..201: note = Description of Unknown: target sequence
  source 1..201: mol_type = unassigned DNA
gaagataaggggaaactgaaaaatgagcatgggaggaagtagccagggagggaggaggaaaaccaggcgaacactgtgttctagaagccaagcaaagatggactttcaagaagaagagagtcatcaactgtgtcaaatgctgcttataggatgatagaggaccactgattggatttaagaaagtggaagtccttggccacc

SEQ ID NO: 122 - DNA, 201 bp, Homo sapiens
  misc_feature 1..201: note = Description of Unknown: target sequence
  source 1..201: mol_type = unassigned DNA
gaagataaggggaaactgaaaaatgagcatgggaggaagtagccagggagggaggaggaaaaccaggcgaacactgtgttctagaagccaagcaaagatggagtttcaagaagaagagagtcatcaactgtgtcaaatgctgcttataggatgatagaggaccactgattggatttaagaaagtggaagtccttggccacc

SEQ ID NO: 123 - DNA, 201 bp, Homo sapiens
  misc_feature 1..201: note = Description of Unknown: target sequence
  source 1..201: mol_type = unassigned DNA
tttcctgacttagtcccttaccctcagagactgaacaagagctgtaatttttacatgggtgcccaggatgtggccttgtcccctgtatcctttccaacctagatttgagctgctgccttctattaactgccttttctggctaaggtgggaggcagagcccaagccgatcccaggatgatgggagaccccagccatgttcct

SEQ ID NO: 124 - DNA, 201 bp, Homo sapiens
  misc_feature 1..201: note = Description of Unknown: target sequence
  source 1..201: mol_type = unassigned DNA
tttcctgacttagtcccttaccctcagagactgaacaagagctgtaatttttacatgggtgcccaggatgtggccttgtcccctgtatcctttccaacctagctttgagctgctgccttctattaactgccttttctggctaaggtgggaggcagagcccaagccgatcccaggatgatgggagaccccagccatgttcct

SEQ ID NO: 125 - DNA, 201 bp, Homo sapiens
  misc_feature 1..201: note = Description of Unknown: target sequence
  source 1..201: mol_type = unassigned DNA
ccttctaaagccaccgaaagttaattggtaggatatcacaggggtgttttaacttttctttgaattttctccaatcttagtaacacagctgactggggcaatcgcatctcacttctacttgatttctaaatatttgttaactaatattcttcatttatgctaagatagacagtttttacatttaataattttagaataaga

SEQ ID NO: 126 - DNA, 201 bp, Homo sapiens
  misc_feature 1..201: note = Description of Unknown: target sequence
  source 1..201: mol_type = unassigned DNA
ccttctaaagccaccgaaagttaattggtaggatatcacaggggtgttttaacttttctttgaattttctccaatcttagtaacacagctgactggggcaatggcatctcacttctacttgatttctaaatatttgttaactaatattcttcatttatgctaagatagacagtttttacatttaataattttagaataaga

SEQ ID NO: 127 - DNA, 201 bp, Homo sapiens
  misc_feature 1..201: note = Description of Unknown: target sequence
  source 1..201: mol_type = unassigned DNA
taacagcaagcaatagtatctatttgaatagaaaccaacacctgttatttgaagttgaaggtatgtgagtttgaccgtgatccttaaatagcagcacagacccatttgcaaaccgtggattgatgtggccccagcggagcaggggagacggagatgcagggggggtgttgtgtgcttggtggagggactgggttctgcagg

SEQ ID NO: 128 - DNA, 201 bp, Homo sapiens
  misc_feature 1..201: note = Description of Unknown: target sequence
  source 1..201: mol_type = unassigned DNA
taacagcaagcaatagtatctatttgaatagaaaccaacacctgttatttgaagttgaaggtatgtgagtttgaccgtgatccttaaatagcagcacagacctatttgcaaaccgtggattgatgtggccccagcggagcaggggagacggagatgcagggggggtgttgtgtgcttggtggagggactgggttctgcagg

SEQ ID NO: 129 - DNA, 201 bp, Homo sapiens
  misc_feature 1..201: note = Description of Unknown: target sequence
  source 1..201: mol_type = unassigned DNA
attaatcaaagtccatactgcaggtaagtggcagaactgaggtctgaaccaaggaagtctgactccagtgcctacgatcataatcacaagtacctcgaatacattggtaagatggcacatgactggtagctttgctgtagaggaatcttaccttgtcatacaaatcaatatgccttgtgaaaaatttttcaaatgcttgaa

SEQ ID NO: 130 - DNA, 201 bp, Homo sapiens
  misc_feature 1..201: note = Description of Unknown: target sequence
  source 1..201: mol_type = unassigned DNA
attaatcaaagtccatactgcaggtaagtggcagaactgaggtctgaaccaaggaagtctgactccagtgcctacgatcataatcacaagtacctcgaatacgttggtaagatggcacatgactggtagctttgctgtagaggaatcttaccttgtcatacaaatcaatatgccttgtgaaaaatttttcaaatgcttgaa

SEQ ID NO: 131 - DNA, 201 bp, Homo sapiens
  misc_feature 1..201: note = Description of Unknown: target sequence
  source 1..201: mol_type = unassigned DNA
tcctgcctgctgaaaggagcccagcgactccaacaccaacgtcattcattaggaaaacaaaaccgaagactcgcatgcacgtatatgtacacacacaaaatgaacaaatagtgggaagaattattgtaagtcttaagtcacaggaaatttgatttgcttcaactaaaacacccgaggataggccggcgtggcgggtcgccc

SEQ ID NO: 132 - DNA, 201 bp, Homo sapiens
  misc_feature 1..201: note = Description of Unknown: target sequence
  source 1..201: mol_type = unassigned DNA
tcctgcctgctgaaaggagcccagcgactccaacaccaacgtcattcattaggaaaacaaaaccgaagactcgcatgcacgtatatgtacacacacaaaatgcacaaatagtgggaagaattattgtaagtcttaagtcacaggaaatttgatttgcttcaactaaaacacccgaggataggccggcgtggcgggtcgccc

SEQ ID NO: 133 - DNA, 201 bp, Homo sapiens
  misc_feature 1..201: note = Description of Unknown: target sequence
  source 1..201: mol_type = unassigned DNA
cacgctctggtaggcactgaggttggtggtgaaacccagctgggagatggaggcgcccttgtcccgcagcactcggtactcctcccagcagtagtagatgccatatgccagcacgcccagcactcccaggatcagcaccagcaccaggggcccagccaccaggcgcagaagcaagataaacagtaggctcaagaccagagc

SEQ ID NO: 134 - DNA, 201 bp, Homo sapiens
  misc_feature 1..201: note = Description of Unknown: target sequence
  source 1..201: mol_type = unassigned DNA
cacgctctggtaggcactgaggttggtggtgaaacccagctgggagatggaggcgcccttgtcccgcagcactcggtactcctcccagcagtagtagatgccgtatgccagcacgcccagcactcccaggatcagcaccagcaccaggggcccagccaccaggcgcagaagcaagataaacagtaggctcaagaccagagc

SEQ ID NO: 135 - DNA, 201 bp, Homo sapiens
  misc_feature 1..201: note = Description of Unknown: target sequence
  source 1..201: mol_type = unassigned DNA
tatttcctattttaatttccctagttgcctccaaaataccttttatagctatttttattttttcctgatccaaggtacaatcaagactcatgcattgcaaggataaatttttttttccctaagtgatcttcattgggagaagtaaaacaattttatgttaaactctaagtgaggtgatattttgttctcagattttgaact

SEQ ID NO: 136 - DNA, 201 bp, Homo sapiens
  misc_feature 1..201: note = Description of Unknown: target sequence
  source 1..201: mol_type = unassigned DNA
tatttcctattttaatttccctagttgcctccaaaataccttttatagctatttttattttttcctgatccaaggtacaatcaagactcatgcattgcaagggtaaatttttttttccctaagtgatcttcattgggagaagtaaaacaattttatgttaaactctaagtgaggtgatattttgttctcagattttgaact

SEQ ID NO: 137 - DNA, 201 bp, Homo sapiens
  misc_feature 1..201: note = Description of Unknown: target sequence
  source 1..201: mol_type = unassigned DNA
atcaagatctgcagctccagaggttgccatttcccatgcccagatagttggcttacaagcctagcttcaaagcatgccttggctcacagagtcatctcttttagggatgtccccaccctgtactcatctcaaagccatcgagaaccatctctaaatgtcatatctggcagtgatctctcttttctctgatccgttgtcgca

SEQ ID NO: 138 - DNA, 201 bp, Homo sapiens
  misc_feature 1..201: note = Description of Unknown: target sequence
  source 1..201: mol_type = unassigned DNA
atcaagatctgcagctccagaggttgccatttcccatgcccagatagttggcttacaagcctagcttcaaagcatgccttggctcacagagtcatctctttttgggatgtccccaccctgtactcatctcaaagccatcgagaaccatctctaaatgtcatatctggcagtgatctctcttttctctgatccgttgtcgca

SEQ ID NO: 139 - DNA, 201 bp, Homo sapiens
  misc_feature 1..201: note = Description of Unknown: target sequence
  source 1..201: mol_type = unassigned DNA
cctatggacaacaaactgtgcctaatgaattctggccagagccaaaacaatgaaattatttatctccacctcccctattgatgcacagcagaaataaatataaggatcaccaccttctgtgcaaatgcaaataagtatactcgcagaaacaaaaatttcaacctacaatttcagttttcctcaccttttgcttacactcta

SEQ ID NO: 140 - DNA, 201 bp, Homo sapiens
  misc_feature 1..201: note = Description of Unknown: target sequence
  source 1..201: mol_type = unassigned DNA
cctatggacaacaaactgtgcctaatgaattctggccagagccaaaacaatgaaattatttatctccacctcccctattgatgcacagcagaaataaatatagggatcaccaccttctgtgcaaatgcaaataagtatactcgcagaaacaaaaatttcaacctacaatttcagttttcctcaccttttgcttacactcta

SEQ ID NO: 141 - DNA, 201 bp, Homo sapiens
  misc_feature 1..201: note = Description of Unknown: target sequence
  source 1..201: mol_type = unassigned DNA
aggcatgaagtaagggtcgaggtccaagggtgtgtgacacaacattgctaccatgttatagagggatattctaaacaaaatctctgcattcttaccccatgaaccctatcttcagcctttaccactggaaagcatctttctaaattcaaatccttgatttgcttctggttttgtaataaagtcatgagcaataggaatgca

SEQ ID NO: 142 - DNA, 201 bp, Homo sapiens
  misc_feature 1..201: note = Description of Unknown: target sequence
  source 1..201: mol_type = unassigned DNA
aggcatgaagtaagggtcgaggtccaagggtgtgtgacacaacattgctaccatgttatagagggatattctaaacaaaatctctgcattcttaccccatgagccctatcttcagcctttaccactggaaagcatctttctaaattcaaatccttgatttgcttctggttttgtaataaagtcatgagcaataggaatgca

SEQ ID NO: 143 - DNA, 201 bp, Homo sapiens
  misc_feature 1..201: note = Description of Unknown: target sequence
  source 1..201: mol_type = unassigned DNA
tcagacctctaggccctccttccttagactccggagtccctcctgcctctgacactcacgaggtccagaccccaagatagcccagccagcagggacagggacaggtaagcctcacatgctgggctctgcaggagaatgagaggggctgaagctgggcccctctcgctttcctctttctctctcctccccttcacacctgaa

SEQ ID NO: 144 - DNA, 201 bp, Homo sapiens
  misc_feature 1..201: note = Description of Unknown: target sequence
  source 1..201: mol_type = unassigned DNA
tcagacctctaggccctccttccttagactccggagtccctcctgcctctgacactcacgaggtccagaccccaagatagcccagccagcagggacagggacgggtaagcctcacatgctgggctctgcaggagaatgagaggggctgaagctgggcccctctcgctttcctctttctctctcctccccttcacacctgaa

SEQ ID NO: 145 - DNA, 201 bp, Homo sapiens
  misc_feature 1..201: note = Description of Unknown: target sequence
  source 1..201: mol_type = unassigned DNA
taatgaacagaatatttactaaatgctagagagtaaaaatcctttctatcctttcaccaaatccctagattagttgtatggggagggggcaggaagcagtacatggaagaaaagctcttactaggcttttcagtaagcagaaaacatgagctcctagataggacggcaaattcatttttaaatcaacggcaattcctatga

SEQ ID NO: 146 - DNA, 201 bp, Homo sapiens
  misc_feature 1..201: note = Description of Unknown: target sequence
  source 1..201: mol_type = unassigned DNA
taatgaacagaatatttactaaatgctagagagtaaaaatcctttctatcctttcaccaaatccctagattagttgtatggggagggggcaggaagcagtacgtggaagaaaagctcttactaggcttttcagtaagcagaaaacatgagctcctagataggacggcaaattcatttttaaatcaacggcaattcctatga

SEQ ID NO: 147 - DNA, 201 bp, Homo sapiens
  misc_feature 1..201: note = Description of Unknown: target sequence
  source 1..201: mol_type = unassigned DNA
gatctattaggattgaatatgctttgtaaacagtagcataaccagatatttctgactccattctatagtatgtagtcttcagttatcaggacaagtatctttcatgctgtaactcagccttgagaactcgttggcacattgctcggtcagtgatctgggagtccagtcattgcaacggggatgcactgagcacctgctgat

SEQ ID NO: 148 - DNA, 201 bp, Homo sapiens
  misc_feature 1..201: note = Description of Unknown: target sequence
  source 1..201: mol_type = unassigned DNA
gatctattaggattgaatatgctttgtaaacagtagcataaccagatatttctgactccattctatagtatgtagtcttcagttatcaggacaagtatcttttatgctgtaactcagccttgagaactcgttggcacattgctcggtcagtgatctgggagtccagtcattgcaacggggatgcactgagcacctgctgat

SEQ ID NO: 149 - DNA, 201 bp, Homo sapiens
  misc_feature 1..201: note = Description of Unknown: target sequence
  source 1..201: mol_type = unassigned DNA
ttgaaagggtgtttaataagataattgggccgggcacagtggctcatgcctgtaatcccagcattttgggaggctgaggagggcagatcatgaggtcaggaggttgagaccagcctgaccaacatggtgaaaccccgtctctactaaaaatacaaaaattagccaggcgtggtggcacacacctgtaatcccagctactca

SEQ ID NO: 150 - DNA, 201 bp, Homo sapiens
  misc_feature 1..201: note = Description of Unknown: target sequence
  source 1..201: mol_type = unassigned DNA
ttgaaagggtgtttaataagataattgggccgggcacagtggctcatgcctgtaatcccagcattttgggaggctgaggagggcagatcatgaggtcaggagtttgagaccagcctgaccaacatggtgaaaccccgtctctactaaaaatacaaaaattagccaggcgtggtggcacacacctgtaatcccagctactca

SEQ ID NO: 151 - DNA, 201 bp, Homo sapiens
  misc_feature 1..201: note = Description of Unknown: target sequence
  source 1..201: mol_type = unassigned DNA
gggccacagcaagcaaggggcagcggcttttgcctccccaccctgccctggccccgtcacctcccaaggagggaaaggtgatgcatacgtgcccgaagaaaccgaccgcataggttattttcacgcagcccctccaaggcaggcactaactggacacctgctttgcgtctcagctgttgaaatgccatcccctgcccccag

SEQ ID NO: 152 - DNA, 201 bp, Homo sapiens
  misc_feature 1..201: note = Description of Unknown: target sequence
  source 1..201: mol_type = unassigned DNA
gggccacagcaagcaaggggcagcggcttttgcctccccaccctgccctggccccgtcacctcccaaggagggaaaggtgatgcatacgtgcccgaagaaactgaccgcataggttattttcacgcagcccctccaaggcaggcactaactggacacctgctttgcgtctcagctgttgaaatgccatcccctgcccccag

SEQ ID NO: 153 - DNA, 201 bp, Homo sapiens
  misc_feature 1..201: note = Description of Unknown: target sequence
  source 1..201: mol_type = unassigned DNA
gggcacagaaaggaccctagagggtcatctgacctgggcccagacaccctgagacccatgacccctggactcttgcagatgccagttcaatcccccatttcccctttttatttaatcagcacttttctgagcatcagcagtgctggaggccctgtgccaggcgcttcccatcagcagctcgtttagacctcacagctgttc

SEQ ID NO: 154 - DNA, 201 bp, Homo sapiens
  misc_feature 1..201: note = Description of Unknown: target sequence
  source 1..201: mol_type = unassigned DNA
gggcacagaaaggaccctagagggtcatctgacctgggcccagacaccctgagacccatgacccctggactcttgcagatgccagttcaatcccccatttcctctttttatttaatcagcacttttctgagcatcagcagtgctggaggccctgtgccaggcgcttcccatcagcagctcgtttagacctcacagctgttc

SEQ ID NO: 155 - DNA, 201 bp, Homo sapiens
  misc_feature 1..201: note = Description of Unknown: target sequence
  source 1..201: mol_type = unassigned DNA
ttgggaaagaatttgaactcatcttccaatatatcctactaacaaaatttttttgagatgatgaatagatttgttcttataaccagtgtggaaagttaactccatggggctaaacaaattctcttaacgtcaacacacaacacaggacaggagacaaaaagtaatgtgagattatattttagtatgccattaaaaattttg

SEQ ID NO: 156 - DNA, 201 bp, Homo sapiens
  misc_feature 1..201: note = Description of Unknown: target sequence
  source 1..201: mol_type = unassigned DNA
ttgggaaagaatttgaactcatcttccaatatatcctactaacaaaatttttttgagatgatgaatagatttgttcttataaccagtgtggaaagttaactctatggggctaaacaaattctcttaacgtcaacacacaacacaggacaggagacaaaaagtaatgtgagattatattttagtatgccattaaaaattttg

SEQ ID NO: 157 - DNA, 201 bp, Homo sapiens
  misc_feature 1..201: note = Description of Unknown: target sequence
  source 1..201: mol_type = unassigned DNA
ggaaggtgggctgagcctgtgggcaggtgttggtgctcccctccccgacggggcacgatggggacagagcatgggagggaatatgaagcaggagctctgtctcgtacacatggaatctgaggagctgacagatgacctgtggggagggtggtcccgtgccaatgtgtgctggaaggacatgcctgtgcgtttatcagctct

SEQ ID NO: 158 - DNA, 201 bp, Homo sapiens
  misc_feature 1..201: note = Description of Unknown: target sequence
  source 1..201: mol_type = unassigned DNA
ggaaggtgggctgagcctgtgggcaggtgttggtgctcccctccccgacggggcacgatggggacagagcatgggagggaatatgaagcaggagctctgtcttgtacacatggaatctgaggagctgacagatgacctgtggggagggtggtcccgtgccaatgtgtgctggaaggacatgcctgtgcgtttatcagctct

SEQ ID NO: 159 - DNA, 201 bp, Homo sapiens
  misc_feature 1..201: note = Description of Unknown: target sequence
  source 1..201: mol_type = unassigned DNA
aagaaaatgtatgttgtttcttaaatatcatttacagctgtaaaatattctgttgaggatgccacctaattcaattaaccattctcctgtcctcaaatatttacttcctccttcttttggggttttataaagaacaatatggtaaacatctgtgtgcatgtaagttcttgcttgctttctttttttttttttttttttgag

SEQ ID NO: 160 - DNA, 201 bp, Homo sapiens
  misc_feature 1..201: note = Description of Unknown: target sequence
  source 1..201: mol_type = unassigned DNA
aagaaaatgtatgttgtttcttaaatatcatttacagctgtaaaatattctgttgaggatgccacctaattcaattaaccattctcctgtcctcaaatatttccttcctccttcttttggggttttataaagaacaatatggtaaacatctgtgtgcatgtaagttcttgcttgctttctttttttttttttttttttgag

SEQ ID NO: 161 - DNA, 201 bp, Homo sapiens
  misc_feature 1..201: note = Description of Unknown: target sequence
  source 1..201: mol_type = unassigned DNA
ttgtagatgggtaacagcccagagatgggaagggacgtgcacaagatgggaatgggcgtgcccatggttgcaccgtgtggtgtggcagagcaggaactggaacacaggcggctggaagtgaaagtggagctcaggctttttagcagttactatgtgtgatttccttttcatcatcacatcaaccccatttttttttttcag

SEQ ID NO: 162 - DNA, 201 bp, Homo sapiens
  misc_feature 1..201: note = Description of Unknown: target sequence
  source 1..201: mol_type = unassigned DNA
ttgtagatgggtaacagcccagagatgggaagggacgtgcacaagatgggaatgggcgtgcccatggttgcaccgtgtggtgtggcagagcaggaactggaatacaggcggctggaagtgaaagtggagctcaggctttttagcagttactatgtgtgatttccttttcatcatcacatcaaccccatttttttttttcag

SEQ ID NO: 163 - DNA, 199 bp, Homo sapiens
  misc_feature 1..199: note = Description of Unknown: target sequence
  source 1..199: mol_type = unassigned DNA
tctaaagcttccctctgaatgctgctttggaggattgtgagaggtagtgactcttcaaagtttgtttgttttcttgaagcttttacctctatgcaaatatgcagtttggagcagggaagaaaggttaactgtgatggcgccggctcttaacgtggaatgtcctgaattaatgtgggtttcagtcctctggctcaggatc

SEQ ID NO: 164 - DNA, 199 bp, Homo sapiens
  misc_feature 1..199: note = Description of Unknown: target sequence
  source 1..199: mol_type = unassigned DNA
tctaaagcttccctctgaatgctgctttggaggattgtgagaggtagtgactcttcaaagtttgtttgttttcttgaagcttttacctctatgcaaatatgcggtttggagcagggaagaaaggttaactgtgatggcgccggctcttaacgtggaatgtcctgaattaatgtgggtttcagtcctctggctcaggatc

SEQ ID NO: 165 - DNA, 199 bp, Homo sapiens
  misc_feature 1..199: note = Description of Unknown: target sequence
  source 1..199: mol_type = unassigned DNA
tctaaagcttccctctgaatgctgctttggaggattgtgagaggtagtgactcttcaaagtttgtttgttttcttgaagcttttacctctatgcaaatatgctgtttggagcagggaagaaaggttaactgtgatggcgccggctcttaacgtggaatgtcctgaattaatgtgggtttcagtcctctggctcaggatc

SEQ ID NO: 166 - DNA, 201 bp, Homo sapiens
  misc_feature 1..201: note = Description of Unknown: target sequence
  source 1..201: mol_type = unassigned DNA
caggagggagggaagaaggaagcccagctcactcatccaaccggaaggacccctgctccaggcaggactggaataacgccaggactccaaatgagcaagataatcccagcctggcctgcctgggataaggagcgggcagggaaacccagaggagaagcactgactttggcaggatggggcatgtgagggcacctggaaggc

SEQ ID NO: 167 - DNA, 201 bp, Homo sapiens
  misc_feature 1..201: note = Description of Unknown: target sequence
  source 1..201: mol_type = unassigned DNA
caggagggagggaagaaggaagcccagctcactcatccaaccggaaggacccctgctccaggcaggactggaataacgccaggactccaaatgagcaagatagtcccagcctggcctgcctgggataaggagcgggcagggaaacccagaggagaagcactgactttggcaggatggggcatgtgagggcacctggaaggc

SEQ ID NO: 168 - DNA, 24 bp, synthetic construct
  misc_feature 1..24: note = Description of Artificial Sequence: Synthetic primer
  source 1..24: mol_type = other DNA
acaagtatgttgccattctgtgga

SEQ ID NO: 169 - DNA, 28 bp, synthetic construct
  misc_feature 1..28: note = Description of Artificial Sequence: Synthetic primer
  source 1..28: mol_type = other DNA
agtttcaaagtttggaaggggaaaataa

SEQ ID NO: 170 - DNA, 26 bp, synthetic construct
  misc_feature 1..26: note = Description of Artificial Sequence: Synthetic primer
  source 1..26: mol_type = other DNA
caagggatgaatccatagctcaaagc

SEQ ID NO: 171 - DNA, 26 bp, synthetic construct
  misc_feature 1..26: note = Description of Artificial Sequence: Synthetic primer
  source 1..26: mol_type = other DNA
aggcccagagagacattaaaatgaga

SEQ ID NO: 172 - DNA, 22 bp, synthetic construct
  misc_feature 1..22: note = Description of Artificial Sequence: Synthetic primer
  source 1..22: mol_type = other DNA
cccggtaggaataaggcaagcc

SEQ ID NO: 173 - DNA, 21 bp, synthetic construct
  misc_feature 1..21: note = Description of Artificial Sequence: Synthetic primer
  source 1..21: mol_type = other DNA
gtccatcttaccctcccggag

SEQ ID NO: 174 - DNA, 26 bp, synthetic construct
  misc_feature 1..26: note = Description of Artificial Sequence: Synthetic primer
  source 1..26: mol_type = other DNA
tcccttagtgcttcaggattctagag

SEQ ID NO: 175 - DNA, 21 bp, synthetic construct
  misc_feature 1..21: note = Description of Artificial Sequence: Synthetic primer
  source 1..21: mol_type = other DNA
ctgtgacatcagctgaggcac

SEQ ID NO: 176 - DNA, 21 bp, synthetic construct
  misc_feature 1..21: note = Description of Artificial Sequence: Synthetic primer
  source 1..21: mol_type = other DNA
gctgtgtggggtgtgtgtgag

SEQ ID NO: 177 - DNA, 19 bp, synthetic construct
  misc_feature 1..19: note = Description of Artificial Sequence: Synthetic primer
  source 1..19: mol_type = other DNA
ctcgcacacacacagcctc

SEQ ID NO: 178 - DNA, 22 bp, synthetic construct
  misc_feature 1..22: note = Description of Artificial Sequence: Synthetic primer
  source 1..22: mol_type = other DNA
atgggagacttcaacacctcac

SEQ ID NO: 179 - DNA, 31 bp, synthetic construct
  misc_feature 1..31: note = Description of Artificial Sequence: Synthetic primer
  source 1..31: mol_type = other DNA
tggatatccttgttaactttctgtctctatc

SEQ ID NO: 180 - DNA, 27 bp, synthetic construct
  misc_feature 1..27: note = Description of Artificial Sequence: Synthetic primer
  source 1..27: mol_type = other DNA
acagacaacaaaaactaagtgtaggtc

SEQ ID NO: 181 - DNA, 32 bp, synthetic construct
  misc_feature 1..32: note = Description of Artificial Sequence: Synthetic primer
  source 1..32: mol_type = other DNA
tcatcactcagtcacctctataaattaaaatc

SEQ ID NO: 182 - DNA, 33 bp, synthetic construct
  misc_feature 1..33: note = Description of Artificial Sequence: Synthetic primer
  source 1..33: mol_type = other DNA
catggataataatgataaaaccttatggaatgc

SEQ ID NO: 183 - DNA, 25 bp, synthetic construct
  misc_feature 1..25: note = Description of Artificial Sequence: Synthetic primer
  source 1..25: mol_type = other DNA
ccctaatgcagtcatccgagaatac

SEQ ID NO: 184 - DNA, 22 bp, synthetic construct
  misc_feature 1..22: note = Description of Artificial Sequence: Synthetic primer
  source 1..22: mol_type = other DNA
ytccaagctcatccatgctgtc

SEQ ID NO: 185 - DNA, 34 bp, synthetic construct
  misc_feature 1..34: note = Description of Artificial Sequence: Synthetic primer
  source 1..34: mol_type = other DNA
tggataaagaaaatgtgagagatatatacaatgg

SEQ ID NO: 186 - DNA, 32 bp, synthetic construct
  misc_feature 1..32: note = Description of Artificial Sequence: Synthetic primer
  source 1..32: mol_type = other DNA
tcccaaatccctgcttcatctaacatatattg

SEQ ID NO: 187 - DNA, 35 bp, synthetic construct
  misc_feature 1..35: note = Description of Artificial Sequence: Synthetic primer
  source 1..35: mol_type = other DNA
gtcatataataaatattgctttgtgttctatctgg

SEQ ID NO: 188 - DNA, 22 bp, synthetic construct
  misc_feature 1..22: note = Description of Artificial Sequence: Synthetic primer
  source 1..22: mol_type = other DNA
tggggccaacctagtcatttgc

SEQ ID NO: 189 - DNA, 32 bp, synthetic construct
  misc_feature 1..32: note = Description of Artificial Sequence: Synthetic primer
  source 1..32: mol_type = other DNA
tgtgattcatttatatcagaatcatcagggag

SEQ ID NO: 190 - DNA, 34 bp, synthetic construct
  misc_feature 1..34: note = Description of Artificial Sequence: Synthetic primer
  source 1..34: mol_type = other DNA
ctggcccagttacttattttagaagttatatttg

SEQ ID NO: 191 - DNA, 19 bp, synthetic construct
  misc_feature 1..19: note = Description of Artificial Sequence: Synthetic primer
  source 1..19: mol_type = other DNA
acagctcatgccagggctc

SEQ ID NO: 192 - DNA, 23 bp, synthetic construct
  misc_feature 1..23: note = Description of Artificial Sequence: Synthetic primer
  source 1..23: mol_type = other DNA
agaaactgtcacagcaagaggac

SEQ ID NO: 193 - DNA, 23 bp, synthetic construct
  misc_feature 1..23: note = Description of Artificial Sequence: Synthetic primer
  source 1..23: mol_type = other DNA
tgccatccaggacaccatattac

SEQ ID NO: 194 - DNA, 28 bp, synthetic construct
  misc_feature 1..28: note = Description of Artificial Sequence: Synthetic primer
  source 1..28: mol_type = other DNA
catcagagtgttagacaataagatgcag

SEQ ID NO: 195 - DNA, 23 bp, synthetic construct
  misc_feature 1..23: note = Description of Artificial Sequence: Synthetic primer
  source 1..23: mol_type = other DNA
gcctgtctttggttagcagtgag

SEQ ID NO: 196 - DNA, 22 bp, synthetic construct
  misc_feature 1..22: note = Description of Artificial Sequence: Synthetic primer
  source 1..22: mol_type = other DNA
tttgagatggagtcttgccctg

SEQ ID NO: 197 - DNA, 20 bp, synthetic construct
  misc_feature 1..20: note = Description of Artificial Sequence: Synthetic primer
  source 1..20: mol_type = other DNA
gagttgagatcacgccaccg

SEQ ID NO: 198 - DNA, 24 bp, synthetic construct
  misc_feature 1..24: note = Description of Artificial Sequence: Synthetic primer
  source 1..24: mol_type = other DNA
aaattggagattgccctcatttgg

SEQ ID NO: 199 - DNA, 23 bp, synthetic construct
  misc_feature 1..23: note = Description of Artificial Sequence: Synthetic primer
  source 1..23: mol_type = other DNA
tgaaatcactggactaagcaccc

SEQ ID NO: 200 - DNA, 18 bp, synthetic construct
  misc_feature 1..18: note = Description of Artificial Sequence: Synthetic primer
  source 1..18: mol_type = other DNA
atcctccagcctccaccg

SEQ ID NO: 201 - DNA, 18 bp, synthetic construct
  misc_feature 1..18: note = Description of Artificial Sequence: Synthetic primer
  source 1..18: mol_type = other DNA
gcagggcctcctcctgag

SEQ ID NO: 202 - DNA, 19 bp, synthetic construct
  misc_feature 1..19: note = Description of Artificial Sequence: Synthetic primer
  source 1..19: mol_type = other DNA
tctgggctggttctggctg

SEQ ID NO: 203 - DNA, 21 bp, synthetic construct
  misc_feature 1..21: note = Description of Artificial Sequence: Synthetic primer
  source 1..21: mol_type = other DNA
caccctctgcagctcaaagtc

SEQ ID NO: 204 - DNA, 25 bp, synthetic construct
  misc_feature 1..25: note = Description of Artificial Sequence: Synthetic primer
  source 1..25: mol_type = other DNA
aggctagagatgtagtcagacccta

SEQ ID NO: 205 - DNA, 25 bp, synthetic construct
  misc_feature 1..25: note = Description of Artificial Sequence: Synthetic primer
  source 1..25: mol_type = other DNA
ccattaaaacctgttcctgaggtct

SEQ ID NO: 206 - DNA, 22 bp, synthetic construct
  misc_feature 1..22: note = Description of Artificial Sequence: Synthetic primer
  source 1..22: mol_type = other DNA
gctctggtttagctccctactc

SEQ ID NO: 207 - DNA, 22 bp, synthetic construct
  misc_feature 1..22: note = Description of Artificial Sequence: Synthetic primer
  source 1..22: mol_type = other DNA
aggttcccttccaaactgactc

SEQ ID NO: 208 - DNA, 27 bp, synthetic construct
  misc_feature 1..27: note = Description of Artificial Sequence: Synthetic primer
  source 1..27: mol_type = other DNA
agaygacagtcatgcttcgatttaagt

SEQ ID NO: 209 - DNA, 26 bp, synthetic construct
  misc_feature 1..26: note = Description of Artificial Sequence: Synthetic primer
  source 1..26: mol_type = other DNA
ggaacgaagaacaacttcctctagga

SEQ ID NO: 210 - DNA, 22 bp, synthetic construct
  misc_feature 1..22: note = Description of Artificial Sequence: Synthetic primer
  source 1..22: mol_type = other DNA
tcacccattggctcctaatgtg

SEQ ID NO: 211 - DNA, 22 bp, synthetic construct
  misc_feature 1..22: note = Description of Artificial Sequence: Synthetic primer
  source 1..22: mol_type = other DNA
tgttgaacgctcactgaggtag

SEQ ID NO: 212 - DNA, 28 bp, synthetic construct
  misc_feature 1..28: note = Description of Artificial Sequence: Synthetic primer
  source 1..28: mol_type = other DNA
gttctggaactactggtatttattgctg

SEQ ID NO: 213 - DNA, 25 bp, synthetic construct
  misc_feature 1..25: note = Description of Artificial Sequence: Synthetic primer
  source 1..25: mol_type = other DNA
ctcttttaggaggacttgtgcaatg

SEQ ID NO: 214 - DNA, 22 bp, synthetic construct
  misc_feature 1..22: note = Description of Artificial Sequence: Synthetic primer
  source 1..22: mol_type = other DNA
gctcaagagatctgcctgcctc

SEQ ID NO: 215 - DNA, 22 bp, synthetic construct
  misc_feature 1..22: note = Description of Artificial Sequence: Synthetic primer
  source 1..22: mol_type = other DNA
aaagaatgcaggctctgggcag

SEQ ID NO: 216 - DNA, 21 bp, synthetic construct
  misc_feature 1..21: note = Description of Artificial Sequence: Synthetic primer
  source 1..21: mol_type = other DNA
agtggcgtggtggaaagtttc

SEQ ID NO: 217 - DNA, 17 bp, synthetic construct
  misc_feature 1..17: note = Description of Artificial Sequence: Synthetic primer
  source 1..17: mol_type = other DNA
tcccgctgtctcaggcg

SEQ ID NO: 218 - DNA, 21 bp, synthetic construct
  misc_feature 1..21: note = Description of Artificial Sequence: Synthetic primer
  source 1..21: mol_type = other DNA
cctggcctttgagactccctc

SEQ ID NO: 219 - DNA, 19 bp, synthetic construct
  misc_feature 1..19: note = Description of Artificial Sequence: Synthetic primer
  source 1..19: mol_type = other DNA
tccacagctgggctcagag

SEQ ID NO: 220 - DNA, 24 bp, synthetic construct
  misc_feature 1..24: note = Description of Artificial Sequence: Synthetic primer
  source 1..24: mol_type = other DNA
ccacagtagaaaatgtgcctgtgg

SEQ ID NO: 221 - DNA, 21 bp, synthetic construct
  misc_feature 1..21: note = Description of Artificial Sequence: Synthetic primer
  source 1..21: mol_type = other DNA
tgccgagggttgttcatcctc

SEQ ID NO: 222 - DNA, 31 bp, synthetic construct
  misc_feature 1..31: note = Description of Artificial Sequence: Synthetic primer
  source 1..31: mol_type = other DNA
gagttctttattcygtttcattggtctatgt

SEQ ID NO: 223 - DNA, 28 bp, synthetic construct
  misc_feature 1..28: note = Description of Artificial Sequence: Synthetic primer
  source 1..28: mol_type = other DNA
cttggtaaagagtgagacactttcaaaa

SEQ ID NO: 224 - DNA, 24 bp, synthetic construct
  misc_feature 1..24: note = Description of Artificial Sequence: Synthetic primer
  source 1..24: mol_type = other DNA
acatgagatttagtggggacagag

SEQ ID NO: 225 - DNA, 21 bp, synthetic construct
  misc_feature 1..21: note = Description of Artificial Sequence: Synthetic primer
  source 1..21: mol_type = other DNA
tgaaatttggaggggctgggg

SEQ ID NO: 226 - DNA, 25 bp, synthetic construct
  misc_feature 1..25: note = Description of Artificial Sequence: Synthetic primer
  source 1..25: mol_type = other DNA
accaaaggcaaagaagttcaaaact

SEQ ID NO: 227 - DNA, 26 bp, synthetic construct
  misc_feature 1..26: note = Description of Artificial Sequence: Synthetic primer
  source 1..26: mol_type = other DNA
cagctcctttaagcacttttctgtat

SEQ ID NO: 228 - DNA, 35 bp, synthetic construct
  misc_feature 1..35: note = Description of Artificial Sequence: Synthetic primer
  source 1..35: mol_type = other DNA
gaaagaatgttacttctgttaatatgaatagcatg

SEQ ID NO: 229 - DNA, 21 bp, synthetic construct
  misc_feature 1..21: note = Description of Artificial Sequence: Synthetic primer
  source 1..21: mol_type = other DNA
aggtcaggctccatatggacc

SEQ ID NO: 230 - DNA, 22 bp, synthetic construct
  misc_feature 1..22: note = Description of Artificial Sequence: Synthetic primer
  source 1..22: mol_type = other DNA
aagatggcttctggagtgctac

SEQ ID NO: 231 - DNA, 23 bp, synthetic construct
  misc_feature 1..23: note = Description of Artificial Sequence: Synthetic primer
  source 1..23: mol_type = other DNA
ttgcccttttccttctagcctac

SEQ ID NO: 232 - DNA, 23 bp, synthetic construct
  misc_feature 1..23: note = Description of Artificial Sequence: Synthetic primer
  source 1..23: mol_type = other DNA
aggagcaagccatcacacttgac

SEQ ID NO: 233 - DNA, 22 bp, synthetic construct
  misc_feature 1..22: note = Description of Artificial Sequence: Synthetic primer
  source 1..22: mol_type = other DNA
gcctgggcaacaagagtgaaac

SEQ ID NO: 234 - DNA, 21 bp, synthetic construct
  misc_feature 1..21: note = Description of Artificial Sequence: Synthetic primer
  source 1..21: mol_type = other DNA
agcctggccagaatatctgcg

SEQ ID NO: 235 - DNA, 25 bp, synthetic construct
  misc_feature 1..25: note = Description of Artificial Sequence: Synthetic primer
  source 1..25: mol_type = other DNA
ccccaattattgtcatccttctccc

SEQ ID NO: 236 - DNA, 27 bp, synthetic construct
  misc_feature 1..27: note = Description of Artificial Sequence: Synthetic primer
  source 1..27: mol_type = other DNA
tgggaatttcagactatagaagctctc

SEQ ID NO: 237 - DNA, 29 bp, synthetic construct
  misc_feature 1..29: note = Description of Artificial Sequence: Synthetic primer
  source 1..29: mol_type = other DNA
tgatgagttctgatacagtaactagtggt

SEQ ID NO: 238 - DNA, 22 bp, synthetic construct
  misc_feature 1..22: note = Description of Artificial Sequence: Synthetic primer
  source 1..22: mol_type = other DNA
aggagcagtgactccactccag

SEQ ID NO: 239 - DNA, 20 bp, synthetic construct
  misc_feature 1..20: note = Description of Artificial Sequence: Synthetic primer
  source 1..20: mol_type = other DNA
cgcacgtcctaagctgacag

SEQ ID NO: 240 - DNA, 27 bp, synthetic construct
  misc_feature 1..27: note = Description of Artificial Sequence: Synthetic primer
  source 1..27: mol_type = other DNA
acaagtttaccgatgtaaaaccttcac

SEQ ID NO: 241 - DNA, 23 bp, synthetic construct
  misc_feature 1..23: note = Description of Artificial Sequence: Synthetic primer
  source 1..23: mol_type = other DNA
gctgctcgtggcctatttttatg

SEQ ID NO: 242 - DNA, 22 bp, synthetic construct
  misc_feature 1..22: note = Description of Artificial Sequence: Synthetic primer
  source 1..22: mol_type = other DNA
cagctgacaccctccttgaatc

SEQ ID NO: 243 - DNA, 22 bp, synthetic construct
  misc_feature 1..22: note = Description of Artificial Sequence: Synthetic primer
  source 1..22: mol_type = other DNA
ttttctaatggggccagggaag

SEQ ID NO: 244 - DNA, 22 bp, synthetic construct
  misc_feature 1..22: note = Description of Artificial Sequence: Synthetic primer
  source 1..22: mol_type = other DNA
atgttgctgcactgttcccatg

SEQ ID NO: 245 - DNA, 26 bp, synthetic construct
  misc_feature 1..26: note = Description of Artificial Sequence: Synthetic primer
  source 1..26: mol_type = other DNA
gaaaaaagaatgcacgtstgagttac

SEQ ID NO: 246 - DNA, 21 bp, synthetic construct
  misc_feature 1..21: note = Description of Artificial Sequence: Synthetic primer
  source 1..21: mol_type = other DNA
ccacaggtcaaatgaggctcc

SEQ ID NO: 247 - DNA, 23 bp, synthetic construct
  misc_feature 1..23: note = Description of Artificial Sequence: Synthetic primer
  source 1..23: mol_type = other DNA
ggataaaagccactcctgtccag

SEQ ID NO: 248 - DNA, 20 bp, synthetic construct
  misc_feature 1..20: note = Description of Artificial Sequence: Synthetic primer
  source 1..20: mol_type = other DNA
ccggcctcgtacggtaattc

SEQ ID NO: 249 - DNA, 19 bp, synthetic construct
  misc_feature 1..19: note = Description of Artificial Sequence: Synthetic primer
  source 1..19: mol_type = other DNA
agttcgccagctccgagac

SEQ ID NO: 250 - DNA, 22 bp, synthetic construct
  misc_feature 1..22: note = Description of Artificial Sequence: Synthetic primer
  source 1..22: mol_type = other DNA
tccctaacgcaatccctgtgac

SEQ ID NO: 251 - DNA, 27 bp, synthetic construct
  misc_feature 1..27: note = Description of Artificial Sequence: Synthetic primer
  source 1..27: mol_type = other DNA
ggatctgtctctcccctttactcttag

SEQ ID NO: 252 - DNA, 21 bp, synthetic construct
  misc_feature 1..21: note = Description of Artificial Sequence: Synthetic primer
  source 1..21: mol_type = other DNA
ttcaagaccagccaggatgac

SEQ ID NO: 253 - DNA, 23 bp, synthetic construct
  misc_feature 1..23: note = Description of Artificial Sequence: Synthetic primer
  source 1..23: mol_type = other DNA
ctgtgtgtcaccattcacagctg

SEQ ID NO: 254 - DNA, 29 bp, synthetic construct
  misc_feature 1..29: note = Description of Artificial Sequence: Synthetic primer
  source 1..29: mol_type = other DNA
tgtccttcacagcttagattcaatctttc

SEQ ID NO: 255 - DNA, 22 bp, synthetic construct
  misc_feature 1..22: note = Description of Artificial Sequence: Synthetic primer
  source 1..22: mol_type = other DNA
gagtcagcccagaatcacactc

SEQ ID NO: 256 - DNA, 20 bp, synthetic construct
  misc_feature 1..20: note = Description of Artificial Sequence: Synthetic primer
  source 1..20: mol_type = other DNA
tgccaggcctgaggatcttc

SEQ ID NO: 257 - DNA, 23 bp, synthetic construct
  misc_feature 1..23: note = Description of Artificial Sequence: Synthetic primer
  source 1..23: mol_type = other DNA
ttccctaggaccagtgtaccatg

SEQ ID NO: 258 - DNA, 26 bp, synthetic construct
  misc_feature 1..26: note = Description of Artificial Sequence: Synthetic primer
  source 1..26: mol_type = other DNA
agacttcaacaaatatgtgctgttgt

SEQ ID NO: 259 - DNA, 30 bp, synthetic construct
  misc_feature 1..30: note = Description of Artificial Sequence: Synthetic primer
  source 1..30: mol_type = other DNA
tgtcaaccagagataataaaaacacaggta

SEQ ID NO: 260 - DNA, 22 bp, synthetic construct
  misc_feature 1..22: note = Description of Artificial Sequence: Synthetic primer
  source 1..22: mol_type = other DNA
aggctggtctcaaactcctgac

SEQ ID NO: 261 - DNA, 25 bp, synthetic construct
  misc_feature 1..25: note = Description of Artificial Sequence: Synthetic primer
  source 1..25: mol_type = other DNA
acctgtaatcccagcactttgagag

SEQ ID NO: 262 - DNA, 23 bp, synthetic construct
  misc_feature 1..23: note = Description of Artificial Sequence: Synthetic primer
  source 1..23: mol_type = other DNA
actttgcattcgtgccacaatag

SEQ ID NO: 263 - DNA, 23 bp, synthetic construct
  misc_feature 1..23: note = Description of Artificial Sequence: Synthetic primer
  source 1..23: mol_type = other DNA
ggctccaaagaccaaatggaatg

SEQ ID NO: 264 - DNA, 32 bp, synthetic construct
  misc_feature 1..32: note = Description of Artificial Sequence: Synthetic primer
  source 1..32: mol_type = other DNA
atgaaaaatgtttgaatatgatctttagggac

SEQ ID NO: 265 - DNA, 34 bp, synthetic construct
  misc_feature 1..34: note = Description of Artificial Sequence: Synthetic primer
  source 1..34: mol_type = other DNA
catgtacagaatttattgttcccatttcatatac

SEQ ID NO: 266 - DNA, 20 bp, synthetic construct
  misc_feature 1..20: note = Description of Artificial Sequence: Synthetic primer
  source 1..20: mol_type = other DNA
catctaggccagcccttccc

SEQ ID NO: 267 - DNA, 20 bp, synthetic construct
  misc_feature 1..20: note = Description of Artificial Sequence: Synthetic primer
  source 1..20: mol_type = other DNA
tacttgaaggtccccaggcg

SEQ ID NO: 268 - DNA, 26 bp, synthetic construct
  misc_feature 1..26: note = Description of Artificial Sequence: Synthetic primer
  source 1..26: mol_type = other DNA
agaacctattgtggatgttaggagag

SEQ ID NO: 269 - DNA, 23 bp, synthetic construct
  misc_feature 1..23: note = Description of Artificial Sequence: Synthetic primer
  source 1..23: mol_type = other DNA
ggcttcatctcccagagtcattg

SEQ ID NO: 270 - DNA, 25 bp, synthetic construct
  misc_feature 1..25: note = Description of Artificial Sequence: Synthetic primer
  source 1..25: mol_type = other DNA
acagtcagcagtaatctcacatctg

SEQ ID NO: 271 - DNA, 25 bp, synthetic construct
  misc_feature 1..25: note = Description of Artificial Sequence: Synthetic primer
  source 1..25: mol_type = other DNA
gggaagaagaaagcattgttgtgac

SEQ ID NO: 272 - DNA, 28 bp, synthetic construct
  misc_feature 1..28: note = Description of Artificial Sequence: Synthetic primer
  source 1..28: mol_type = other DNA
acagaaaagtttttaccacagactacca

SEQ ID NO: 273 - DNA, 25 bp, synthetic construct
  misc_feature 1..25: note = Description of Artificial Sequence: Synthetic primer
  source 1..25: mol_type = other DNA
tcttgttatgcagatgaagcctcaa

SEQ ID NO: 274 - DNA, 29 bp, synthetic construct
  misc_feature 1..29: note = Description of Artificial Sequence: Synthetic primer
  source 1..29: mol_type = other DNA
acctcayacattatgmagcatagggtatc

SEQ ID NO: 275 - DNA, 25 bp, synthetic construct
  misc_feature 1..25: note = Description of Artificial Sequence: Synthetic primer
  source 1..25: mol_type = other DNA
ggtgtacatgtatttatgccacccc

SEQ ID NO: 276 - DNA, 23 bp, synthetic construct
  misc_feature 1..23: note = Description of Artificial Sequence: Synthetic primer
  source 1..23: mol_type = other DNA
ccacattctgtcgtggttgagac

SEQ ID NO: 277 - DNA, 21 bp, synthetic construct
  misc_feature 1..21: note = Description of Artificial Sequence: Synthetic primer
  source 1..21: mol_type = other DNA
ctcctgacaggactccacacc

SEQ ID NO: 278 - DNA, 24 bp, synthetic construct
  misc_feature 1..24: note = Description of Artificial Sequence: Synthetic primer
  source 1..24: mol_type = other DNA
gggagcagagctgagtttctaaac

SEQ ID NO: 279 - DNA, 33 bp, synthetic construct
  misc_feature 1..33: note = Description of Artificial Sequence: Synthetic primer
  source 1..33: mol_type = other DNA
tccttctgtgaagtatctccayatatggatttg

SEQ ID NO: 280 - DNA, 22 bp, synthetic construct
  misc_feature 1..22: note = Description of Artificial Sequence: Synthetic primer
  source 1..22: mol_type = other DNA
agtgcctaattgttcacccagc

SEQ ID NO: 281 - DNA, 33 bp, synthetic construct
  misc_feature 1..33: note = Description of Artificial Sequence: Synthetic primer
  source 1..33: mol_type = other DNA
avcagtgaggctytataaataaaattaattgtg

SEQ ID NO: 282 - DNA, 22 bp, synthetic construct
  misc_feature 1..22: note = Description of Artificial Sequence: Synthetic primer
  source 1..22: mol_type = other DNA
gatcccagggctccttgaagag

SEQ ID NO: 283 - DNA, 24 bp, synthetic construct
  misc_feature 1..24: note = Description of Artificial Sequence: Synthetic primer
  source 1..24: mol_type = other DNA
aagaaatccaactgtgcaagtgtg

SEQ ID NO: 284 - DNA, 25 bp, synthetic construct
  misc_feature 1..25: note = Description of Artificial Sequence: Synthetic primer
  source 1..25: mol_type = other DNA
gtgttctagaagccaagcaaagatg

SEQ ID NO: 285 - DNA, 23 bp, synthetic construct
  misc_feature 1..23: note = Description of Artificial Sequence: Synthetic primer
  source 1..23: mol_type = other DNA
agcagcatttgacacagttgatg

SEQ ID NO: 286 - DNA, 22 bp, synthetic construct
  misc_feature 1..22: note = Description of Artificial Sequence: Synthetic primer
  source 1..22: mol_type = other DNA
gccttgtcccctgtatcctttc

SEQ ID NO: 287 - DNA, 25 bp, synthetic construct
  misc_feature 1..25: note = Description of Artificial Sequence: Synthetic primer
  source 1..25: mol_type = other DNA
ccagaaaaggcagttaatagaaggc

SEQ ID NO: 288 - DNA, 29 bp, synthetic construct
  misc_feature 1..29: note = Description of Artificial Sequence: Synthetic primer
  source 1..29: mol_type = other DNA
ttytctccaatcttagtaacacagctgac

SEQ ID NO: 289 - DNA, 34 bp, synthetic construct
  misc_feature 1..34: note = Description of Artificial Sequence: Synthetic primer
  source 1..34: mol_type = other DNA
acaaatatttagaaatcaagtagaagtgagatrc

SEQ ID NO: 290 - DNA, 25 bp, synthetic construct
  misc_feature 1..25: note = Description of Artificial Sequence: Synthetic primer
  source 1..25: mol_type = other DNA
ccgtgatccttaaatagcagcacag

SEQ ID NO: 291 - DNA, 21 bp, synthetic construct
  misc_feature 1..21: note = Description of Artificial Sequence: Synthetic primer
  source 1..21: mol_type = other DNA
ctggggccacatcaatccacg

SEQ ID NO: 292 - DNA, 27 bp, synthetic construct
  misc_feature 1..27: note = Description of Artificial Sequence: Synthetic primer
  source 1..27: mol_type = other DNA
cctacgatcataatcacaagtacctcg

SEQ ID NO: 293 - DNA, 22 bp, synthetic construct
  misc_feature 1..22: note = Description of Artificial Sequence: Synthetic primer
  source 1..22: mol_type = other DNA
gcaaagctaccagtcatgtgcc

SEQ ID NO: 294 - DNA, 24 bp, synthetic construct
  misc_feature 1..24: note = Description of Artificial Sequence: Synthetic primer
  source 1..24: mol_type = other DNA
actcgcatgcacgtatatgtacac

SEQ ID NO: 295 - DNA, 31 bp, synthetic construct
  misc_feature 1..31: note = Description of Artificial Sequence: Synthetic primer
  source 1..31: mol_type = other DNA
cctgtgacttaagacttacaataattcttcc

SEQ ID NO: 296 - DNA, 23 bp, synthetic construct
  misc_feature 1..23: note = Description of Artificial Sequence: Synthetic primer
  source 1..23: mol_type = other DNA
actcctcccagcagtagtagatg

SEQ ID NO: 297 - DNA, 20 bp, synthetic construct
  misc_feature 1..20: note = Description of Artificial Sequence: Synthetic primer
  source 1..20: mol_type = other DNA
tgctgatcctgggagtgctg

SEQ ID NO: 298 - DNA, 25 bp, synthetic construct
  misc_feature 1..25: note = Description of Artificial Sequence: Synthetic primer
  source 1..25: mol_type = other DNA
acaatcaagactcatgcattgcaag

SEQ ID NO: 299 - DNA, 26 bp, synthetic construct
  misc_feature 1..26: note = Description of Artificial Sequence: Synthetic primer
  source 1..26: mol_type = other DNA
acttctcccaatgaagatcacttagg

SEQ ID NO: 300 - DNA, 22 bp, synthetic construct
  misc_feature 1..22: note = Description of Artificial Sequence: Synthetic primer
  source 1..22: mol_type = other DNA
ccttggctcacagagtcatctc

SEQ ID NO: 301 - DNA, 23 bp, synthetic construct
  misc_feature 1..23: note = Description of Artificial Sequence: Synthetic primer
  source 1..23: mol_type = other DNA
gctttgagatgagtacagggtgg

SEQ ID NO: 302 - DNA, 21 bp, synthetic construct
  misc_feature 1..21: note = Description of Artificial Sequence: Synthetic primer
  source 1..21: mol_type = other DNA
cctcccctattgatgcacagc

SEQ ID NO: 303 - DNA, 28 bp, synthetic construct
  misc_feature 1..28: note = Description of Artificial Sequence: Synthetic primer
  source 1..28: mol_type = other DNA
ttctgcgagtatacttatttgcatttgc

SEQ ID NO: 304 - DNA, 26 bp, synthetic construct
  misc_feature 1..26: note = Description of Artificial Sequence: Synthetic primer
  source 1..26: mol_type = other DNA
caaaatctctgcattcttaccccatg

SEQ ID NO: 305 - DNA, 23 bp, synthetic construct
  misc_feature 1..23: note = Description of Artificial Sequence: Synthetic primer
  source 1..23: mol_type = other DNA
agatgctttccagtggtaaaggc

SEQ ID NO: 306 - DNA, 20 bp, synthetic construct
  misc_feature 1..20: note = Description of Artificial Sequence: Synthetic primer
  source 1..20: mol_type = other DNA
caagatagcccagccagcag

SEQ ID NO: 307 - DNA, 18 bp, synthetic construct
  misc_feature 1..18: note = Description of Artificial Sequence: Synthetic primer
  source 1..18: mol_type = other DNA
tgcagagcccagcatgtg

SEQ ID NO: 308 - DNA, 17 bp, synthetic construct
  misc_feature 1..17: note = Description of Artificial Sequence: Synthetic primer
  source 1..17: mol_type = other DNA
gggagggggcaggaagc

SEQ ID NO: 309 - DNA, 26 bp, synthetic construct
  misc_feature 1..26: note = Description of Artificial Sequence: Synthetic primer
  source 1..26: mol_type = other DNA
tctaggagctcatgttttctgcttac

SEQ ID NO: 310 - DNA, 29 bp, synthetic construct
  misc_feature 1..29: note = Description of Artificial Sequence: Synthetic primer
  source 1..29: mol_type = other DNA
tgtagtcttcagttatcaggacaagtatc

SEQ ID NO: 311 - DNA, 21 bp, synthetic construct
  misc_feature 1..21: note = Description of Artificial Sequence: Synthetic primer
  source 1..21: mol_type = other DNA
tgtgccaaygagttctcaagg

SEQ ID NO: 312 - DNA, 21 bp, synthetic construct
  misc_feature 1..21: note = Description of Artificial Sequence: Synthetic primer
  source 1..21: mol_type = other DNA
gagggcagatcatgaggtcag

SEQ ID NO: 313 - DNA, 20 bp, synthetic construct
  misc_feature 1..20: note = Description of Artificial Sequence: Synthetic primer
  source 1..20: mol_type = other DNA
acggggtttcaccatgttgg

SEQ ID NO: 314 - DNA, 23 bp, synthetic construct
  misc_feature 1..23: note = Description of Artificial Sequence: Synthetic primer
  source 1..23: mol_type = other DNA
aaggagggaaaggtgatgcatac

SEQ ID NO: 315 - DNA, 22 bp, synthetic construct
  misc_feature 1..22: note = Description of Artificial Sequence: Synthetic primer
  source 1..22: mol_type = other DNA
ggaggggctgcgtgaaaataac

SEQ ID NO: 316 - DNA, 21 bp, synthetic construct
  misc_feature 1..21: note = Description of Artificial Sequence: Synthetic primer
  source 1..21: mol_type = other DNA
tgccagttcaatcccccattt

SEQ ID NO: 317 - DNA, 17 bp, synthetic construct
  misc_feature 1..17: note = Description of Artificial Sequence: Synthetic primer
  source 1..17: mol_type = other DNA
gggcctccagcactgct

SEQ ID NO: 318 - DNA, 30 bp, synthetic construct
  misc_feature 1..30: note = Description of Artificial Sequence: Synthetic primer
  source 1..30: mol_type = other DNA
ttgttcttataaccagtgtggaaagttaac

SEQ ID NO: 319 - DNA, 25 bp, synthetic construct
  misc_feature 1..25: note = Description of Artificial Sequence: Synthetic primer
  source 1..25: mol_type = other DNA
tcctgtgttgtgtgttgacgttaag

SEQ ID NO: 320 - DNA, 23 bp, synthetic construct
  misc_feature 1..23: note = Description of Artificial Sequence: Synthetic primer
  source 1..23: mol_type = other DNA
tgggagggaatatgaagcaggag

SEQ ID NO: 321 - DNA, 23 bp, synthetic construct
  misc_feature 1..23: note = Description of Artificial Sequence: Synthetic primer
  source 1..23: mol_type = other DNA
catctgycagctcctcagattcc

SEQ ID NO: 322 - DNA, 26 bp, synthetic construct
  misc_feature 1..26: note = Description of Artificial Sequence: Synthetic primer
  source 1..26: mol_type = other DNA
tcaattaaccaktctcctgtcctcaa

SEQ ID NO: 323 - DNA, 32 bp, synthetic construct
  misc_feature 1..32: note = Description of Artificial Sequence: Synthetic primer
  source 1..32: mol_type = other DNA
accatattgttctttataaaaccccaaaagaa

SEQ ID NO: 324 - DNA, 19 bp, synthetic construct
  misc_feature 1..19: note = Description of Artificial Sequence: Synthetic primer
  source 1..19: mol_type = other DNA
ggtgtggcagagcaggaac

SEQ ID NO: 325 - DNA, 22 bp, synthetic construct
  misc_feature 1..22: note = Description of Artificial Sequence: Synthetic primer
  source 1..22: mol_type = other DNA
gcctgagctccactttcacttc

SEQ ID NO: 326 - DNA, 30 bp, synthetic construct
  misc_feature 1..30: note = Description of Artificial Sequence: Synthetic primer
  source 1..30: mol_type = other DNA
tcttgaagcttttacctctatgcaaatayg

SEQ ID NO: 327 - DNA, 24 bp, synthetic construct
  misc_feature 1..24: note = Description of Artificial Sequence: Synthetic primer
  source 1..24: mol_type = other DNA
cgccatcacagttaacctttcttc

SEQ ID NO: 328 - DNA, 22 bp, synthetic construct
  misc_feature 1..22: note = Description of Artificial Sequence: Synthetic primer
  source 1..22: mol_type = other DNA
gccaggactccaaatgagcaag

SEQ ID NO: 329 - DNA, 19 bp, synthetic construct
  misc_feature 1..19: note = Description of Artificial Sequence: Synthetic primer
  source 1..19: mol_type = other DNA
cgctccttatcccaggcag

SEQ ID NO: 330 - DNA, 101 bp, Solanum lycopersicum
  source 1..101: mol_type = unassigned DNA
acaatatactcagtgtattagaagtgtggcctggagagggtaggatgtacacgaccttacctctacctttgaagggtggagaggttgtttccgatagaccc

SEQ ID NO: 331 - DNA, 101 bp, Solanum lycopersicum
  source 1..101: mol_type = unassigned DNA
acaatatactcagtgtattagaagtgtggcctggagagggtaggatgtacgcgaccttacctctacctttgaagggtggagaggttgtttccgatagaccc

SEQ ID NO: 332 - DNA, 101 bp, Solanum lycopersicum
  source 1..101: mol_type = unassigned DNA
tgaattcggataatggatctgttgtacttctttcttgcagcttttgcctgtttttcacgaaaagatttaggaatcaataatttcgactcctctagtttctt

SEQ ID NO: 333 - DNA, 101 bp, Solanum lycopersicum
  source 1..101: mol_type = unassigned DNA
tgaattcggataatggatctgttgtacttctttcttgcagcttttgcctgcttttcacgaaaagatttaggaatcaataatttcgactcctctagtttctt

SEQ ID NO: 334 - DNA, 101 bp, Solanum lycopersicum
  source 1..101: mol_type = unassigned DNA
tgtttctaagtgattgtggaggaaaaagataccctttgttgcaacatccaattgcgccagatggaccagttctttttttgccatttttgaagggatgcaag

SEQ ID NO: 335 - DNA, 101 bp, Solanum lycopersicum
  source 1..101: mol_type = unassigned DNA
tgtttctaagtgattgtggaggaaaaagataccctttgttgcaacatccagttgcgccagatggaccagttctttttttgccatttttgaagggatgcaag

SEQ ID NO: 336 - DNA, 101 bp, Solanum lycopersicum
  source 1..101: mol_type = unassigned DNA
tctctgttgcatttgtagatggtggtgaggctggaaatgtaatccctgaaagtgtgaagtttggtggaacattccggttcttgacgtttgagggtcattcc

SEQ ID NO: 337 - DNA, 101 bp, Solanum lycopersicum
  source 1..101: mol_type = unassigned DNA
tctctgttgcatttgtagatggtggtgaggctggaaatgtaatccctgaaggtgtgaagtttggtggaacattccggttcttgacgtttgagggtcattcc

SEQ ID NO: 338 - DNA, 101 bp, Solanum lycopersicum
  source 1..101: mol_type = unassigned DNA
ggtgagaaagttgcggagccactatacaagatggaggctggtaagacgtataggtatagattttgcaatgtaggtatgaggacatcagtgaatgttaggat

SEQ ID NO: 339 - DNA, 101 bp, Solanum lycopersicum
  source 1..101: mol_type = unassigned DNA
ggtgagaaagttgcggagccactatacaagatggaggctggtaagacgtacaggtatagattttgcaatgtaggtatgaggacatcagtgaatgttaggat

SEQ ID NO: 340 - DNA, 101 bp, Solanum lycopersicum
  source 1..101: mol_type = unassigned DNA
tttgttctatctcttcgcgtaacatttgtgtccaacgaaatctttttgcctcgccacttaaaaagccaagctatcattgtactgttgtctgtcttgcgctt

SEQ ID NO: 341 - DNA, 101 bp, Solanum lycopersicum
  source 1..101: mol_type = unassigned DNA
tttgttctatctcttcgcgtaacatttgtgtccaacgaaatctttttgccgcgccacttaaaaagccaagctatcattgtactgttgtctgtcttgcgctt

SEQ ID NO: 342 - DNA, 101 bp, Solanum lycopersicum
  source 1..101: mol_type = unassigned DNA
ttaccgatatgtcagacagtaagatggagaattttgttcctgcttatgaaatcgtcaaattttacctgtttttcgagaaatggaggcgtggagagatagag

SEQ ID NO: 343 - DNA, 101 bp, Solanum lycopersicum
  source 1..101: mol_type = unassigned DNA
ttaccgatatgtcagacagtaagatggagaattttgttcctgcttatgaattcgtcaaattttacctgtttttcgagaaatggaggcgtggagagatagag

SEQ ID NO: 344 - DNA, 101 bp, Solanum lycopersicum
  source 1..101: mol_type = unassigned DNA
tttgacgcggaaaagtgaagatagcctccaagcatttcaatgccgtctccacttttgcttggagtgagattacccccgaacataagaagagaataatcgga

SEQ ID NO: 345 - DNA, 101 bp, Solanum lycopersicum
  source 1..101: mol_type = unassigned DNA
tttgacgcggaaaagtgaagatagcctccaagcatttcaatgccgtctcctcttttgcttggagtgagattacccccgaacataagaagagaataatcgga

SEQ ID NO: 346 - DNA, 101 bp, Solanum lycopersicum
  source 1..101: mol_type = unassigned DNA
ggaggtagcaataacaacaacaacaacaacaacggggcccaccaccaccatcatcagaaccagtttgataacaataacaacaacaacctcattggctcgtc

SEQ ID NO: 347 - DNA, 101 bp, Solanum lycopersicum
  source 1..101: mol_type = unassigned DNA
ggaggtagcaataacaacaacaacaacaacaacggggcccaccaccaccaccatcagaaccagtttgataacaataacaacaacaacctcattggctcgtc

SEQ ID NO: 348 - DNA, 101 bp, Solanum lycopersicum
  source 1..101: mol_type = unassigned DNA
atgcccagcccattgaacagcatggcaatgctgtggcaatgaaatctgaaatcactgacgcaatgatggaaattcctgctaaggctgtgctagtcagtccc

SEQ ID NO: 349 - DNA, 101 bp, Solanum lycopersicum
  source 1..101: mol_type = unassigned DNA
atgcccagcccattgaacagcatggcaatgctgtggcaatgaaatctgaagtcactgacgcaatgatggaaattcctgctaaggctgtgctagtcagtccc

SEQ ID NO: 350 - DNA, 201 bp, Solanum lycopersicum
  unsure 73: note = a, c, t, g, unknown or other
  source 1..201: mol_type = unassigned DNA
cctttatttgtgtgattattttatggttttcaattaggtctcatgatgccaatgagttatggatattactgangctttgtgattaggtaaaggtgatcacactttgtcaatcaagagacaaggatggcgaagatggtaataaaagcaaccatttcttttttcgagtgctttcttccagtttagattataaaagttcctctt

SEQ ID NO: 351 - DNA, 201 bp, Solanum lycopersicum
  unsure 73: note = a, c, t, g, unknown or other
  source 1..201: mol_type = unassigned DNA
cctttatttgtgtgattattttatggttttcaattaggtctcatgatgccaatgagttatggatattactgangctttgtgattaggtaaaggtgatcactctttgtcaatcaagagacaaggatggcgaagatggtaataaaagcaaccatttcttttttcgagtgctttcttccagtttagattataaaagttcctctt

SEQ ID NO: 352 - DNA, 101 bp, Solanum lycopersicum
  source 1..101: mol_type = unassigned DNA
aatcgttgtacatgctatattttcgcttgtgcctcttctcccatggacttagaaagtatgtttttgctagtgtaagaggaatgcaacgggatcgtttcgtt

SEQ ID NO: 353 - DNA, 101 bp, Solanum lycopersicum
  source 1..101: mol_type = unassigned DNA
aatcgttgtacatgctatattttcgcttgtgcctcttctcccatggacttggaaagtatgtttttgctagtgtaagaggaatgcaacgggatcgtttcgtt

SEQ ID NO: 354 - DNA, 101 bp, Solanum lycopersicum
  source 1..101: mol_type = unassigned DNA
caaatgcatgtaatttgcagaaacaactgcatccactgaagctctattactgatacagaaatattaggggtagagaatattccagtattaattaaattgac

SEQ ID NO: 355 - DNA, 101 bp, Solanum lycopersicum
  source 1..101: mol_type = unassigned DNA
caaatgcatgtaatttgcagaaacaactgcatccactgaagctctattaccgatacagaaatattaggggtagagaatattccagtattaattaaattgac

SEQ ID NO: 356 - DNA, 101 bp, Solanum lycopersicum
  source 1..101: mol_type = unassigned DNA
gatgatatcggtcgtctcatggatgatgatatctctaaggtttcttctgttctctctgtttccagaactgatgcatctgctttactccgtcggtataactg

SEQ ID NO: 357 - DNA, 101 bp, Solanum lycopersicum
  source 1..101: mol_type = unassigned DNA
gatgatatcggtcgtctcatggatgatgatatctctaaggtttcttctgtcctctctgtttccagaactgatgcatctgctttactccgtcggtataactg

SEQ ID NO: 358 - DNA, 101 bp, Solanum lycopersicum
  source 1..101: mol_type = unassigned DNA
tcaagcgctgaacttcttgccaccttctgtgacaacattctcaaaaaaggagggagtgagaaattgagtgatgaagctattgaagaaacgttggaaaaggt

SEQ ID NO: 359 - DNA, 101 bp, Solanum lycopersicum
  source 1..101: mol_type = unassigned DNA
tcaagcgctgaacttcttgccaccttctgtgacaacattctcaaaaaaggcgggagtgagaaattgagtgatgaagctattgaagaaacgttggaaaaggt

SEQ ID NO: 360 - DNA, 101 bp, Solanum lycopersicum
  source 1..101: mol_type = unassigned DNA
caaaatttgggagagctgaagcagagtttcccactcaaggtaaatgtatatagctagtcaaaagtatgccagttgtgtcctgttgcttgtgtatatagttc

SEQ ID NO: 361 - DNA, 101 bp, Solanum lycopersicum
  source 1..101: mol_type = unassigned DNA
caaaatttgggagagctgaagcagagtttcccactcaaggtaaatgtatagagctagtcaaaagtatgccagttgtgtcctgttgcttgtgtatatagttc

SEQ ID NO: 362 - DNA, 101 bp, Solanum lycopersicum
  source 1..101: mol_type = unassigned DNA
gtagagttatgttggtggaaggaagtacagagaagaagcatagagatgtttgagaattgggtgggagattgttttttccagagctccaactatatgatata

SEQ ID NO: 363 - DNA, 101 bp, Solanum lycopersicum
  source 1..101: mol_type = unassigned DNA
gtagagttatgttggtggaaggaagtacagagaagaagcatagagatgttcgagaattgggtgggagattgttttttccagagctccaactatatgatata

SEQ ID NO: 364 - DNA, 101 bp, Solanum lycopersicum
  source 1..101: mol_type = unassigned DNA
ctgctttggcttttcctctacaacaggaacatcgtcaacaccttgaaaacttgtgtctgtggaggaactattttcgccagaaatctgaatgatctgcttca

SEQ ID NO: 365 - DNA, 101 bp, Solanum lycopersicum
  source 1..101: mol_type = unassigned DNA
ctgctttggcttttcctctacaacaggaacatcgtcaacaccttgaaaacctgtgtctgtggaggaactattttcgccagaaatctgaatgatctgcttca

SEQ ID NO: 366 - DNA, 101 bp, Solanum lycopersicum
  source 1..101: mol_type = unassigned DNA
gtactggttttggtttaaaaaaatgaagacatcaatgattgacagtgctcatcctactatcatgctcattaccagggtgggaagaagctcctatcatcaga

SEQ ID NO: 367 - DNA, 101 bp, Solanum lycopersicum
  source 1..101: mol_type = unassigned DNA
gtactggttttggtttaaaaaaatgaagacatcaatgattgacagtgctcgtcctactatcatgctcattaccagggtgggaagaagctcctatcatcaga

SEQ ID NO: 368 - DNA, 101 bp, Solanum lycopersicum
  source 1..101: mol_type = unassigned DNA
gtgaaattgcactgtttcccctttcatcttgagggagctcacatgcttcatttatagaccccgatttcagatcagctggtgggatgaagcagtctactgat

SEQ ID NO: 369 - DNA, 101 bp, Solanum lycopersicum
  source 1..101: mol_type = unassigned DNA
gtgaaattgcactgtttcccctttcatcttgagggagctcacatgcttcacttatagaccccgatttcagatcagctggtgggatgaagcagtctactgat

SEQ ID NO: 370 - DNA, 101 bp, Solanum lycopersicum
  source 1..101: mol_type = unassigned DNA
taagtttttgactctattaactctgtgtggcctgacaatgtaatttgtcttagctagagaaaagttcagtcagaaaataaatttcccatctctctcattgt

SEQ ID NO: 371 - DNA, 101 bp, Solanum lycopersicum
  source 1..101: mol_type = unassigned DNA
taagtttttgactctattaactctgtgtggcctgacaatgtaatttgtctcagctagagaaaagttcagtcagaaaataaatttcccatctctctcattgt

SEQ ID NO: 372 - DNA, 101 bp, Solanum lycopersicum
  source 1..101: mol_type = unassigned DNA
aataaaatggtgaaatggtgtccaagtatccctcattgtgggaatgctatacgagtagagaccgatgagttctgtgaagtagaatgttcatgtggtttaca

SEQ ID NO: 373 - DNA, 101 bp, Solanum lycopersicum
  source 1..101: mol_type = unassigned DNA
aataaaatggtgaaatggtgtccaagtatccctcattgtgggaatgctattcgagtagagaccgatgagttctgtgaagtagaatgttcatgtggtttaca

SEQ ID NO: 374 - DNA, 101 bp, Solanum lycopersicum
  source 1..101: mol_type = unassigned DNA
tacattgacaatggcaatttggagcaatggctacacggtgatgtagggtcagttagtcctctaacttgggaaatcagactgagaattgcaattggaactgc

SEQ ID NO: 375 - DNA, 101 bp, Solanum lycopersicum
  source 1..101: mol_type = unassigned DNA
tacattgacaatggcaatttggagcaatggctacacggtgatgtagggtctgttagtcctctaacttgggaaatcagactgagaattgcaattggaactgc

SEQ ID NO: 376 - DNA, 101 bp, Solanum lycopersicum
  source 1..101: mol_type = unassigned DNA
ggagacactgtgaagagaatatgatgagaggagtgctccggaaacttgggtcgatatgcacattgacattatttgctagagcattcacatgcacttggcat

SEQ ID NO: 377 - DNA, 101 bp, Solanum lycopersicum
  source 1..101: mol_type = unassigned DNA
ggagacactgtgaagagaatatgatgagaggagtgctccggaaacttggggcgatatgcacattgacattatttgctagagcattcacatgcacttggcat

SEQ ID NO: 378 - DNA, 101 bp, Solanum lycopersicum
  source 1..101: mol_type = unassigned DNA
gtatgcagctcacaactactaaacggtcaattttaagtgagcatagtgccattgccaattcccatttctctaaatatcaaaccagaaaacatatttaacgt

SEQ ID NO: 379 - DNA, 101 bp, Solanum lycopersicum
  source 1..101: mol_type = unassigned DNA
gtatgcagctcacaactactaaacggtcaattttaagtgagcatagtgccgttgccaattcccatttctctaaatatcaaaccagaaaacatatttaacgt

SEQ ID NO: 380 - DNA, 101 bp, Solanum lycopersicum
  source 1..101: mol_type = unassigned DNA
gaggaacataaaccactgaagcattagcctttgtctctacttttgcctctacaacagtattaaaaacaggtagccccaaatgttctgttccacccttcttg

SEQ ID NO: 381 - DNA, 101 bp, Solanum lycopersicum
  source 1..101: mol_type = unassigned DNA
gaggaacataaaccactgaagcattagcctttgtctctacttttgcctctgcaacagtattaaaaacaggtagccccaaatgttctgttccacccttcttg

SEQ ID NO: 382 - DNA, 101 bp, Solanum lycopersicum
  source 1..101: mol_type = unassigned DNA
cctctttgaaaatgtttaagatctcggcgagcttggtgacctctaaaacaactttgaacacataagatgccatggagagtgcgatttcttgtatcttcaag

SEQ ID NO: 383 - DNA, 101 bp, Solanum lycopersicum
  source 1..101: mol_type = unassigned DNA
cctctttgaaaatgtttaagatctcggcgagcttggtgacctctaaaacagctttgaacacataagatgccatggagagtgcgatttcttgtatcttcaag

SEQ ID NO: 384 - DNA, 101 bp, Solanum lycopersicum
  source 1..101: mol_type = unassigned DNA
tcagcttattggtgattcctgttcatagatttggctgtattttatgtcttctattgccttaaattcgtgtatggactataaaaaactgattgtttgttgga

SEQ ID NO: 385 - DNA, 101 bp, Solanum lycopersicum
  source 1..101: mol_type = unassigned DNA
tcagcttattggtgattcctgttcatagatttggctgtattttatgtcttgtattgccttaaattcgtgtatggactataaaaaactgattgtttgttgga

SEQ ID NO: 386 - DNA, 101 bp, Solanum lycopersicum
  source 1..101: mol_type = unassigned DNA
aacgataatcttcttacttcttcaataaacctcaggaattctttggagaatgggacgccattgacgttgattccgatgatgatagccatggctccttgaat

SEQ ID NO: 387 - DNA, 101 bp, Solanum lycopersicum
  source 1..101: mol_type = unassigned DNA
aacgataatcttcttacttcttcaataaacctcaggaattctttggagaacgggacgccattgacgttgattccgatgatgatagccatggctccttgaat

SEQ ID NO: 388 - DNA, 101 bp, Solanum lycopersicum
  source 1..101: mol_type = unassigned DNA
aggttgagatggatgattggttgttcgagtttgctcagttattcaggacttatgttggcattgatccggatgcccacattgacctgcacgagcttgggatg

SEQ ID NO: 389 - DNA, 101 bp, Solanum lycopersicum
  source 1..101: mol_type = unassigned DNA
aggttgagatggatgattggttgttcgagtttgctcagttattcaggactcatgttggcattgatccggatgcccacattgacctgcacgagcttgggatg

SEQ ID NO: 390 - DNA, 101 bp, Solanum lycopersicum
  source 1..101: mol_type = unassigned DNA
catatccattaaagaaagagtttagatccaagactgtgaattagggcatttaattactccacatggcaagatagaaagtatgtcacccggatttagaagat

SEQ ID NO: 391 - DNA, 101 bp, Solanum lycopersicum
  source 1..101: mol_type = unassigned DNA
catatccattaaagaaagagtttagatccaagactgtgaattagggcattgaattactccacatggcaagatagaaagtatgtcacccggatttagaagat

SEQ ID NO: 392 - DNA, 101 bp, Solanum lycopersicum
  source 1..101: mol_type = unassigned DNA
tcagatagaaacagtcaaggccaacagggaacaagagactaaaggcctcaatgataaaatttctaggatagaggctgaacttcaagctgctgaatctatca

SEQ ID NO: 393 - DNA, 101 bp, Solanum lycopersicum
  source 1..101: mol_type = unassigned DNA
tcagatagaaacagtcaaggccaacagggaacaagagactaaaggcctcagtgataaaatttctaggatagaggctgaacttcaagctgctgaatctatca

SEQ ID NO: 394 - DNA, 101 bp, Solanum lycopersicum
  source 1..101: mol_type = unassigned DNA
caaccgagccaccggacttgagaataaagcgaaattcctctttgattcactgatcaaagagcagatttcaacctaacagttgaatccatgcacaactcaat

SEQ ID NO: 395 - DNA, 101 bp, Solanum lycopersicum
  source 1..101: mol_type = unassigned DNA
caaccgagccaccggacttgagaataaagcgaaattcctctttgattcaccgatcaaagagcagatttcaacctaacagttgaatccatgcacaactcaat

SEQ ID NO: 396 - DNA, 101 bp, Solanum lycopersicum
  source 1..101: mol_type = unassigned DNA
ttcattttgttgaaaccaaaattatacatagaatatctgtccaacatttaataggctctcatgagggacattgaagattacactattttccctgcatattt

SEQ ID NO: 397 - DNA, 101 bp, Solanum lycopersicum
  source 1..101: mol_type = unassigned DNA
ttcattttgttgaaaccaaaattatacatagaatatctgtccaacatttactaggctctcatgagggacattgaagattacactattttccctgcatattt

SEQ ID NO: 398 - DNA, 101 bp, Solanum lycopersicum
  source 1..101: mol_type = unassigned DNA
tccctgtgtagtatcattttgaaagatacaaagcaaacaagattgattagtcccgcttgcacgaatttgtaagatttttatatctagaacaggatgatagt

SEQ ID NO: 399 - DNA, 101 bp, Solanum lycopersicum
  source 1..101: mol_type = unassigned DNA
tccctgtgtagtatcattttgaaagatacaaagcaaacaagattgattagccccgcttgcacgaatttgtaagatttttatatctagaacaggatgatagt

SEQ ID NO: 400 - DNA, 101 bp, Solanum lycopersicum
  source 1..101: mol_type = unassigned DNA
atttagaaaatcaggatagtaaacattccctggccaaacaaccccttggtagggcatattatcgcgttttatgaagacatctgcttccatgcctctcctat

SEQ ID NO: 401 - DNA, 101 bp, Solanum lycopersicum
  source 1..101: mol_type = unassigned DNA
atttagaaaatcaggatagtaaacattccctggccaaacaaccccttggtggggcatattatcgcgttttatgaagacatctgcttccatgcctctcctat

SEQ ID NO: 402 - DNA, 101 bp, Solanum lycopersicum
  source 1..101: mol_type = unassigned DNA
tgagagaaggagtggcgaagcagaggaaggattttgcgaaggaggctaaaaagtttactaatattaggcatcctaatgtagtaggattaagaggttactac

SEQ ID NO: 403 - DNA, 101 bp, Solanum lycopersicum
  source 1..101: mol_type = unassigned DNA
tgagagaaggagtggcgaagcagaggaaggattttgcgaaggaggctaaagagtttactaatattaggcatcctaatgtagtaggattaagaggttactac

SEQ ID NO: 404 - DNA, 101 bp, Solanum lycopersicum
  source 1..101: mol_type = unassigned DNA
catatgacaagatggagcaacaattgtcaaagactcgtaacctgcattgttagatcaactgtgaacaggtgttttttcttctcttttgcttcatttattta

SEQ ID NO: 405 - DNA, 101 bp, Solanum lycopersicum
  source 1..101: mol_type = unassigned DNA
catatgacaagatggagcaacaattgtcaaagactcgtaacctgcattgtcagatcaactgtgaacaggtgttttttcttctcttttgcttcatttattta

SEQ ID NO: 406 - DNA, 101 bp, Solanum lycopersicum
  source 1..101: mol_type = unassigned DNA
gccaaagagcaagctgaatctgctcaagaggaggcagaggagtggaaacgtaagtacggcattgctgccaaggaagcaaagaatgctcttgagaaggcagc

SEQ ID NO: 407 - DNA, 101 bp, Solanum lycopersicum
  source 1..101: mol_type = unassigned DNA
gccaaagagcaagctgaatctgctcaagaggaggcagaggagtggaaacgcaagtacggcattgctgccaaggaagcaaagaatgctcttgagaaggcagc

SEQ ID NO: 408 - DNA, 101 bp, Solanum lycopersicum
  source 1..101: mol_type = unassigned DNA
accatggacagatgaccttttatggcagtaccacgaagcttgacaagttcatgcagcacagttttcaccattcttaaaggtttatcatcggctcccgctct

SEQ ID NO: 409 - DNA, 101 bp, Solanum lycopersicum
  source 1..101: mol_type = unassigned DNA
accatggacagatgaccttttatggcagtaccacgaagcttgacaagttcgtgcagcacagttttcaccattcttaaaggtttatcatcggctcccgctct

SEQ ID NO: 410 - DNA, 101 bp, Solanum lycopersicum
  source 1..101: mol_type = unassigned DNA
gaagatttgtgggtattgatgcaaaagaagaatgttgatgctgacttgggaagttacaccattagattacaaggattggttgcgaataaccaggttaacga

SEQ ID NO: 411 - DNA, 101 bp, Solanum lycopersicum
  source 1..101: mol_type = unassigned DNA
gaagatttgtgggtattgatgcaaaagaagaatgttgatgctgacttggggagttacaccattagattacaaggattggttgcgaataaccaggttaacga

SEQ ID NO: 412 - DNA, 101 bp, Solanum lycopersicum
  source 1..101: mol_type = unassigned DNA
agacgttattgtgttctgaaccagtgtaattatgttgttcttgatgaagctgaccgtatgattgacatgggttttgagcctcaagttgttggtgtactgga

SEQ ID NO: 413 - DNA, 101 bp, Solanum lycopersicum
  source 1..101: mol_type = unassigned DNA
agacgttattgtgttctgaaccagtgtaattatgttgttcttgatgaagcggaccgtatgattgacatgggttttgagcctcaagttgttggtgtactgga

SEQ ID NO: 414 - DNA, 101 bp, Solanum lycopersicum
  source 1..101: mol_type = unassigned DNA
cccatattgctaatgcagatcaaagagcgggaggattaagcttctatagtagaagatatccatcaaatggagtagcaaacaagcaatgtaccacaatatta

SEQ ID NO: 415 - DNA, 101 bp, Solanum lycopersicum
  source 1..101: mol_type = unassigned DNA
cccatattgctaatgcagatcaaagagcgggaggattaagcttctatagtcgaagatatccatcaaatggagtagcaaacaagcaatgtaccacaatatta

SEQ ID NO: 416 - DNA, 101 bp, Solanum lycopersicum
  source 1..101: mol_type = unassigned DNA
tcacttgatttgatagcagaagcaaaagtagatccagaatccaggttaatagaacatttattgcttgtaaaagatttctggttctgaccagaagatggatc

SEQ ID NO: 417 - DNA, 101 bp, Solanum lycopersicum
  source 1..101: mol_type = unassigned DNA
tcacttgatttgatagcagaagcaaaagtagatccagaatccaggttaattgaacatttattgcttgtaaaagatttctggttctgaccagaagatggatc

SEQ ID NO: 418 - DNA, 101 bp, Solanum lycopersicum
  source 1..101: mol_type = unassigned DNA
ggaggtcaggctgggcaattgggagttgggccattaaatggattcttttcatgcaagctcaatgaatctgagatgatgctccgaaatataccagtgttggt

SEQ ID NO: 419 - DNA, 101 bp, Solanum lycopersicum
  source 1..101: mol_type = unassigned DNA
ggaggtcaggctgggcaattgggagttgggccattaaatggattcttttcctgcaagctcaatgaatctgagatgatgctccgaaatataccagtgttggt

SEQ ID NO: 420 - DNA, 101 bp, Solanum lycopersicum
  source 1..101: mol_type = unassigned DNA
gtgtaatacgatctgccagaccgtggtgggcaggggattctgttagctgataatgctccgtacgaaatgtagtacttgaatttgttccacaatagagatct

SEQ ID NO: 421 - DNA, 101 bp, Solanum lycopersicum
  source 1..101: mol_type = unassigned DNA
gtgtaatacgatctgccagaccgtggtgggcaggggattctgttagctgacaatgctccgtacgaaatgtagtacttgaatttgttccacaatagagatct

SEQ ID NO: 422 - DNA, 101 bp, Solanum lycopersicum
  source 1..101: mol_type = unassigned DNA
cgtcgatcaaaatactcttccaaacctaccgcaaaagataatagcaggcaataacaacaaagattaatctcccccctatatatgacttgagttgtcaggaa

SEQ ID NO: 423 - DNA, 101 bp, Solanum lycopersicum
  source 1..101: mol_type = unassigned DNA
cgtcgatcaaaatactcttccaaacctaccgcaaaagataatagcaggcagtaacaacaaagattaatctcccccctatatatgacttgagttgtcaggaa

SEQ ID NO: 424 - DNA, 101 bp, Solanum lycopersicum
  source 1..101: mol_type = unassigned DNA
ccaggatcacccctctagtagccagccaagtgaaaaagcacaccttcatcagcactttggaaatgtaaactgcatcaaaacttcctcttcctaaccaaaag

SEQ ID NO: 425 - DNA, 101 bp, Solanum lycopersicum
  source 1..101: mol_type = unassigned DNA
ccaggatcacccctctagtagccagccaagtgaaaaagcacaccttcatcggcactttggaaatgtaaactgcatcaaaacttcctcttcctaaccaaaag

SEQ ID NO: 426 - DNA, 101 bp, Solanum lycopersicum
  source 1..101: mol_type = unassigned DNA
actccaagggaccaaataagctttgccattgtaagagataagatcatgtcaaagacaaattggactgtgaatatgttcttagactgcgaacggcgtaactt

SEQ ID NO: 427 - DNA, 101 bp, Solanum lycopersicum
  source 1..101: mol_type = unassigned DNA
actccaagggaccaaataagctttgccattgtaagagataagatcatgtccaagacaaattggactgtgaatatgttcttagactgcgaacggcgtaactt

SEQ ID NO: 428 - DNA, 101 bp, Solanum lycopersicum
  source 1..101: mol_type = unassigned DNA
cgggtgtgcatgtttcaatactgacaaaaaagggccttcaatggtgttgatcgcgctagtgagaaatgaatttggtggttctctgtgccttctttccgcta

SEQ ID NO: 429 - DNA, 101 bp, Solanum lycopersicum
  source 1..101: mol_type = unassigned DNA
cgggtgtgcatgtttcaatactgacaaaaaagggccttcaatggtgttgaccgcgctagtgagaaatgaatttggtggttctctgtgccttctttccgcta

SEQ ID NO: 430 - DNA, 101 bp, Solanum lycopersicum
  source 1..101: mol_type = unassigned DNA
aattccgccagccatttcttcgccggctttttccccctcaacatctccggtgatgtcacgttatctatcaaataggggaggaactcaagtacaaaaggttc

SEQ ID NO: 431 - DNA, 101 bp, Solanum lycopersicum
  source 1..101: mol_type = unassigned DNA
aattccgccagccatttcttcgccggctttttccccctcaacatctccggcgatgtcacgttatctatcaaataggggaggaactcaagtacaaaaggttc

SEQ ID NO: 432 - DNA, 101 bp, Solanum lycopersicum
  source 1..101: mol_type = unassigned DNA
acagctctacaactattgctccgttcattccttcctagcacttttgaggcaaagctaggaggcttaagcttctcaacttgactctgcagagatccatggct

SEQ ID NO: 433 - DNA, 101 bp, Solanum lycopersicum
  source 1..101: mol_type = unassigned DNA
acagctctacaactattgctccgttcattccttcctagcacttttgaggctaagctaggaggcttaagcttctcaacttgactctgcagagatccatggct

SEQ ID NO: 434 - DNA, 101 bp, Solanum lycopersicum
  source 1..101: mol_type = unassigned DNA
actcttgaaccatttgaaagagaccacgcttgtgttgttggtgcctatcgtgtaccaaagaagcaaaaggctgctgcctagaaaatttaagcttatgattt

SEQ ID NO: 435 - DNA, 101 bp, Solanum lycopersicum
  source 1..101: mol_type = unassigned DNA
actcttgaaccatttgaaagagaccacgcttgtgttgttggtgcctatcgcgtaccaaagaagcaaaaggctgctgcctagaaaatttaagcttatgattt

SEQ ID NO: 436 - DNA, 101 bp, Solanum lycopersicum
  source 1..101: mol_type = unassigned DNA
aaacagaaattcgggtttcggttcagaaaaacatcaatgaacaaagtatcaatcaagcaattaacttgaatggcaccccttttgttcttccagagtttttc

SEQ ID NO: 437 - DNA, 101 bp, Solanum lycopersicum
  source 1..101: mol_type = unassigned DNA
aaacagaaattcgggtttcggttcagaaaaacatcaatgaacaaagtatcgatcaagcaattaacttgaatggcaccccttttgttcttccagagtttttc

SEQ ID NO: 438 - DNA, 101 bp, Solanum lycopersicum
  source 1..101: mol_type = unassigned DNA
ctctcctcttttgttaattcatcaattttttcctgcatcagtttcattagtgatacaacttcttcaggccttcgcttgaagttatcaatgctgaatgcata

SEQ ID NO: 439 - DNA, 101 bp, Solanum lycopersicum
  source 1..101: mol_type = unassigned DNA
ctctcctcttttgttaattcatcaattttttcctgcatcagtttcattagcgatacaacttcttcaggccttcgcttgaagttatcaatgctgaatgcata

SEQ ID NO: 440 - DNA, 101 bp, Solanum lycopersicum
  source 1..101: mol_type = unassigned DNA
gggcgtgactcaaacacttgggaagatgcattatctttcaggccagagcgatttctcaactctaatgtggatttcaggggtcaagatttcgagttcatacc

SEQ ID NO: 441 - DNA, 101 bp, Solanum lycopersicum
  source 1..101: mol_type = unassigned DNA
gggcgtgactcaaacacttgggaagatgcattatctttcaggccagagcggtttctcaactctaatgtggatttcaggggtcaagatttcgagttcatacc

SEQ ID NO: 442 - DNA, 101 bp, Solanum lycopersicum
  source 1..101: mol_type = unassigned DNA
gaagagtatgctcttcgacgtctaaggcttttgcagcacatctgctaacgtggagcatatttgttctctcatcgcatccctgttatttgcatcaagtgtaa

SEQ ID NO: 443 - DNA, 101 bp, Solanum lycopersicum
  source 1..101: mol_type = unassigned DNA
gaagagtatgctcttcgacgtctaaggcttttgcagcacatctgctaacgcggagcatatttgttctctcatcgcatccctgttatttgcatcaagtgtaa

SEQ ID NO: 444 - DNA, 101 bp, Solanum lycopersicum
  source 1..101: mol_type = unassigned DNA
ttccatcagcttatgaactccaaacgttgtttgtcaatgagttgtgctaaatactacctctttgaccatcagttcatttaccaggcaaatcaacagggcaa

SEQ ID NO: 445 - DNA, 101 bp, Solanum lycopersicum
  source 1..101: mol_type = unassigned DNA
ttccatcagcttatgaactccaaacgttgtttgtcaatgagttgtgctaagtactacctctttgaccatcagttcatttaccaggcaaatcaacagggcaa

SEQ ID NO: 446 - DNA, 101 bp, Solanum lycopersicum
  source 1..101: mol_type = unassigned DNA
aagtccattgaatccaatatcgaggcagggttgccctgggtgagatctacagtagttatggactctaaattagcagactctggtgagaagtttgcaatatt

SEQ ID NO: 447 - DNA, 101 bp, Solanum lycopersicum
  source 1..101: mol_type = unassigned DNA
aagtccattgaatccaatatcgaggcagggttgccctgggtgagatctactgtagttatggactctaaattagcagactctggtgagaagtttgcaatatt

SEQ ID NO: 448 - DNA, 101 bp, Solanum lycopersicum
  source 1..101: mol_type = unassigned DNA
gaatggaactatcaccacaagtacacaactaaagctttgatgaaaacaccagagctgtttcagtcttgacgaacataccaaccgcattctagtgcttgaaa

SEQ ID NO: 449 - DNA, 101 bp, Solanum lycopersicum
  source 1..101: mol_type = unassigned DNA
gaatggaactatcaccacaagtacacaactaaagctttgatgaaaacaccggagctgtttcagtcttgacgaacataccaaccgcattctagtgcttgaaa

SEQ ID NO: 450 - DNA, 101 bp, Solanum lycopersicum
  source 1..101: mol_type = unassigned DNA
ccctactgatgttgagctgataatgtactatctaaagcggaagatcatggtgaaaaagatcctttttgaagtcatatcagaactcaacatttataagttct

SEQ ID NO: 451 - DNA, 101 bp, Solanum lycopersicum
  source 1..101: mol_type = unassigned DNA
ccctactgatgttgagctgataatgtactatctaaagcggaagatcatggggaaaaagatcctttttgaagtcatatcagaactcaacatttataagttct

SEQ ID NO: 452 - DNA, 101 bp, Solanum lycopersicum
  source 1..101: mol_type = unassigned DNA
agattttgaagttcacccaactcttcaattcttgaatcactaaatgcacctacgacaaatcttgttgaataagaaagtaggagaatctgtaacttgctttt

SEQ ID NO: 453 - DNA, 101 bp, Solanum lycopersicum
  source 1..101: mol_type = unassigned DNA
agattttgaagttcacccaactcttcaattcttgaatcactaaatgcacccacgacaaatcttgttgaataagaaagtaggagaatctgtaacttgctttt

SEQ ID NO: 454 - DNA, 101 bp, Solanum lycopersicum
  source 1..101: mol_type = unassigned DNA
ataatgcaagtctcacatttttcgtgcagataaagtataccccttgatatatccaatgcaagtctcatcctttgctcccaagaaggtcttgtttcagaact

SEQ ID NO: 455 - DNA, 101 bp, Solanum lycopersicum
  source 1..101: mol_type = unassigned DNA
ataatgcaagtctcacatttttcgtgcagataaagtataccccttgatatgtccaatgcaagtctcatcctttgctcccaagaaggtcttgtttcagaact

SEQ ID NO: 456 - DNA, 101 bp, Solanum lycopersicum
  source 1..101: mol_type = unassigned DNA
taccaatagattctccgatcaaagagttttccttgggctcaagcacaccgtcggactttgacaagatcaaaaacaatttttttgcatcgtcgtcagttaac

SEQ ID NO: 457 - DNA, 101 bp, Solanum lycopersicum
  source 1..101: mol_type = unassigned DNA
taccaatagattctccgatcaaagagttttccttgggctcaagcacaccgccggactttgacaagatcaaaaacaatttttttgcatcgtcgtcagttaac

SEQ ID NO: 458 - DNA, 101 bp, Solanum lycopersicum
  source 1..101: mol_type = unassigned DNA
gctatcaactggtgtatatgcaagggtacaattcctatccctggaatcaaatctgtaaaacaaactgaagagaacctaggagcccttggttggcaactcag

SEQ ID NO: 459 - DNA, 101 bp, Solanum lycopersicum
  source 1..101: mol_type = unassigned DNA
gctatcaactggtgtatatgcaagggtacaattcctatccctggaatcaagtctgtaaaacaaactgaagagaacctaggagcccttggttggcaactcag

SEQ ID NO: 460 - DNA, 101 bp, Solanum lycopersicum
  source 1..101: mol_type = unassigned DNA
tcatgctggcagaggaagtgagagaaattatgtctcaacttggtttcagaacacttactgaaatggttggccgttcagacatgcttgaaatggacaatgat

SEQ ID NO: 461 - DNA, 101 bp, Solanum lycopersicum
  source 1..101: mol_type = unassigned DNA
tcatgctggcagaggaagtgagagaaattatgtctcaacttggtttcagagcacttactgaaatggttggccgttcagacatgcttgaaatggacaatgat

SEQ ID NO: 462 - DNA, 101 bp, Solanum lycopersicum
  source 1..101: mol_type = unassigned DNA
aaaagccatccttaagtttccgttcgatgccggaaatttaataccgcaggagacgattggccggaagaggagaattgatcagtgatgcacttagttgagtg

SEQ ID NO: 463 - DNA, 101 bp, Solanum lycopersicum
  source 1..101: mol_type = unassigned DNA
aaaagccatccttaagtttccgttcgatgccggaaatttaataccgcaggtgacgattggccggaagaggagaattgatcagtgatgcacttagttgagtg

SEQ ID NO: 464 - DNA, 101 bp, Solanum lycopersicum
  source 1..101: mol_type = unassigned DNA
caaaacatagaatatcatgcaagttgctggttaagtgccaagaacatggatgttcattgcatgtttaattaactctttcgggtgagatcaaaatctctggt

SEQ ID NO: 465 - DNA, 101 bp, Solanum lycopersicum
  source 1..101: mol_type = unassigned DNA
caaaacatagaatatcatgcaagttgctggttaagtgccaagaacatggacgttcattgcatgtttaattaactctttcgggtgagatcaaaatctctggt

SEQ ID NO: 466 - DNA, 101 bp, Solanum lycopersicum
  source 1..101: mol_type = unassigned DNA
tcgcaactcttatactatgatgggtgttcaattattgagatgtgtaccaaatgcttgtaactgctcactttaagatgaaaagctgccttcactggttagtg

SEQ ID NO: 467 - DNA, 101 bp, Solanum lycopersicum
  source 1..101: mol_type = unassigned DNA
tcgcaactcttatactatgatgggtgttcaattattgagatgtgtaccaagtgcttgtaactgctcactttaagatgaaaagctgccttcactggttagtg

SEQ ID NO: 468 - DNA, 101 bp, Solanum lycopersicum
  source 1..101: mol_type = unassigned DNA
tgatgtaagcaaattttcaagtcgccatgtggtgagtgctgcatatgatcacacaataaaagtttgggatctgcagaagggttactgtaacaacactatca

SEQ ID NO: 469 - DNA, 101 bp, Solanum lycopersicum
  source 1..101: mol_type = unassigned DNA
tgatgtaagcaaattttcaagtcgccatgtggtgagtgctgcatatgatcgcacaataaaagtttgggatctgcagaagggttactgtaacaacactatca

SEQ ID NO: 470 - DNA, 101 bp, Solanum lycopersicum
  source 1..101: mol_type = unassigned DNA
aggaggtggcatctggggtgggaagtaggggaatggttcaattgggaaacaaccgggaggaactggagctccataaggtggccctccgggtggccctctat

SEQ ID NO: 471 - DNA, 101 bp, Solanum lycopersicum
  source 1..101: mol_type = unassigned DNA
aggaggtggcatctggggtgggaagtaggggaatggttcaattgggaaaccaccgggaggaactggagctccataaggtggccctccgggtggccctctat

SEQ ID NO: 472 - DNA, 101 bp, Solanum lycopersicum
  source 1..101: mol_type = unassigned DNA
agcggctgagataaaggattaaatctacaaaacgaagcggaactggacggcttgtgaggcttcttagggagtgaaattgacggagaaaacgagattgctgt

SEQ ID NO: 473 - DNA, 101 bp, Solanum lycopersicum
  source 1..101: mol_type = unassigned DNA
agcggctgagataaaggattaaatctacaaaacgaagcggaactggacgggttgtgaggcttcttagggagtgaaattgacggagaaaacgagattgctgt

SEQ ID NO: 474 - DNA, 101 bp, Solanum lycopersicum
  source 1..101: mol_type = unassigned DNA
ctccaaatattgcagcacctgttgcattgtaggtctatcatctggatttgaatcagtgcatcttgcagctatttctataattgcttctactgtctctgcat

SEQ ID NO: 475 - DNA, 101 bp, Solanum lycopersicum
  source 1..101: mol_type = unassigned DNA
ctccaaatattgcagcacctgttgcattgtaggtctatcatctggatttgcatcagtgcatcttgcagctatttctataattgcttctactgtctctgcat

SEQ ID NO: 476 - DNA, 101 bp, Solanum lycopersicum
  source 1..101: mol_type = unassigned DNA
ggtaacctaactccggctgagactcatcagaatccgccgtcaaatccaccacttccgtctccatcaccttcgccggtgacggagaagctgtaatttcttct

SEQ ID NO: 477 - DNA, 101 bp, Solanum lycopersicum
  source 1..101: mol_type = unassigned DNA
ggtaacctaactccggctgagactcatcagaatccgccgtcaaatccaccgcttccgtctccatcaccttcgccggtgacggagaagctgtaatttcttct

SEQ ID NO: 478 - DNA, 101 bp, Solanum lycopersicum
  source 1..101: mol_type = unassigned DNA
aacgaatcgaaatcatgactcgtggtgcaaaactcggagctatcatcgtcatcggtgagatcgtacaacagattctccttgagtttcttcacttccggtga

SEQ ID NO: 479 - DNA, 101 bp, Solanum lycopersicum
  source 1..101: mol_type = unassigned DNA
aacgaatcgaaatcatgactcgtggtgcaaaactcggagctatcatcgtcgtcggtgagatcgtacaacagattctccttgagtttcttcacttccggtga

SEQ ID NO: 480 - DNA, 101 bp, Solanum lycopersicum
  source 1..101: mol_type = unassigned DNA
ctaaaatcaattatcttgagctgtgaacattgagacagttgagatggaattggaccataaagtgagttatcaggtgctctcagctcttccaatgatgaagc

SEQ ID NO: 481 - DNA, 101 bp, Solanum lycopersicum
  source 1..101: mol_type = unassigned DNA
ctaaaatcaattatcttgagctgtgaacattgagacagttgagatggaatcggaccataaagtgagttatcaggtgctctcagctcttccaatgatgaagc

SEQ ID NO: 482 - DNA, 101 bp, Solanum lycopersicum
  source 1..101: mol_type = unassigned DNA
atcgaagccagaaattgtgattattgattgtggattaaggaattttggtgtggagttgaaatggatgggaataattggagggccgctcaggctcaggctcc

SEQ ID NO: 483 - DNA, 101 bp, Solanum lycopersicum
  source 1..101: mol_type = unassigned DNA
atcgaagccagaaattgtgattattgattgtggattaaggaattttggtgcggagttgaaatggatgggaataattggagggccgctcaggctcaggctcc

SEQ ID NO: 484 - DNA, 101 bp, Solanum lycopersicum
  source 1..101: mol_type = unassigned DNA
tctccggcgaccggagaatcctacgcctgtaaatctatcgataaaaaccttctcattgattccaccgaccgtgagtgtctcgataaagaacccaaaattct

SEQ ID NO: 485 - DNA, 101 bp, Solanum lycopersicum
  source 1..101: mol_type = unassigned DNA
tctccggcgaccggagaatcctacgcctgtaaatctatcgataaaaacctcctcattgattccaccgaccgtgagtgtctcgataaagaacccaaaattct

SEQ ID NO: 486 - DNA, 101 bp, Solanum lycopersicum
  source 1..101: mol_type = unassigned DNA
gatcgaaggtcaattgagagaagcagaagagactatgacaggagcaggagccgtagtaggagtagaagccacagccgaagcttgcatgatcaaggtacaag

SEQ ID NO: 487 - DNA, 101 bp, Solanum lycopersicum
  source 1..101: mol_type = unassigned DNA
gatcgaaggtcaattgagagaagcagaagagactatgacaggagcaggaggcgtagtaggagtagaagccacagccgaagcttgcatgatcaaggtacaag

SEQ ID NO: 488 - DNA, 101 bp, Solanum lycopersicum
  source 1..101: mol_type = unassigned DNA
ctatatgggtcaatatttccctgctcatgatctgcaagaagaagagctttagtacaatcagtggaaggatgttcagacgatcctgtgtcacatgttatctg

SEQ ID NO: 489 - DNA, 101 bp, Solanum lycopersicum
  source 1..101: mol_type = unassigned DNA
ctatatgggtcaatatttccctgctcatgatctgcaagaagaagagctttggtacaatcagtggaaggatgttcagacgatcctgtgtcacatgttatctg

SEQ ID NO: 490 - DNA, 101 bp, Solanum lycopersicum
  source 1..101: mol_type = unassigned DNA
tggcccaaatgaagatatgacaccagaaaatcgatctgttctgtgcgtgccactagaggaaaacgggataaacttacccccacccggagagccaccaaagg

SEQ ID NO: 491 - DNA, 101 bp, Solanum lycopersicum
  source 1..101: mol_type = unassigned DNA
tggcccaaatgaagatatgacaccagaaaatcgatctgttctgtgcgtgcgactagaggaaaacgggataaacttacccccacccggagagccaccaaagg

SEQ ID NO: 492 - DNA, 101 bp, Solanum lycopersicum
  source 1..101: mol_type = unassigned DNA
atagactcgaagcatttcttcgtgccttcaggaaatgcagctgttgaattaataggaggaagggaaacaggcattgcacagacgatacgtacaatcccaaa

SEQ ID NO: 493 - DNA, 101 bp, Solanum lycopersicum
  source 1..101: mol_type = unassigned DNA
atagactcgaagcatttcttcgtgccttcaggaaatgcagctgttgaattgataggaggaagggaaacaggcattgcacagacgatacgtacaatcccaaa

SEQ ID NO: 494 - DNA, 101 bp, Solanum lycopersicum
  source 1..101: mol_type = unassigned DNA
cttcagcaactttaccatcttcattcactttattcttccctttgaagccacaaccaaaaacaaatgtgtcattcagttttggaccctgatactctggttcc

SEQ ID NO: 495 - DNA, 101 bp, Solanum lycopersicum
  source 1..101: mol_type = unassigned DNA
cttcagcaactttaccatcttcattcactttattcttccctttgaagccagaaccaaaaacaaatgtgtcattcagttttggaccctgatactctggttcc

SEQ ID NO: 496 - DNA, 101 bp, Solanum lycopersicum
  source 1..101: mol_type = unassigned DNA
ccattcagaaaatagattcttaaaagttgtgagccatcaaatctccagcttttcagttttggggttgtagttttcggactctacatgttataactacaata

SEQ ID NO: 497 - DNA, 101 bp, Solanum lycopersicum
  source 1..101: mol_type = unassigned DNA
ccattcagaaaatagattcttaaaagttgtgagccatcaaatctccagctcttcagttttggggttgtagttttcggactctacatgttataactacaata

SEQ ID NO: 498 - DNA, 101 bp, Solanum lycopersicum
  source 1..101: mol_type = unassigned DNA
tttataaaatgtgatcttgtatacttcctggacaaccatcaaccatccatttgttctgcctttgtgtagccctcacctggttttttattaaccgctcccag

SEQ ID NO: 499 - DNA, 101 bp, Solanum lycopersicum
  source 1..101: mol_type = unassigned DNA
tttataaaatgtgatcttgtatacttcctggacaaccatcaaccatccatctgttctgcctttgtgtagccctcacctggttttttattaaccgctcccag

SEQ ID NO: 500 - DNA, 101 bp, Solanum lycopersicum
  source 1..101: mol_type = unassigned DNA
gagagaccacacagatgccgacggcgatagacagccgaatactttgtgtaagcgtgctctgaagctctcatcgtccatgccttaccactttctacttcctg

SEQ ID NO: 501 - DNA, 101 bp, Solanum lycopersicum
  source 1..101: mol_type = unassigned DNA
gagagaccacacagatgccgacggcgatagacagccgaatactttgtgtacgcgtgctctgaagctctcatcgtccatgccttaccactttctacttcctg

SEQ ID NO: 502 - DNA, 101 bp, Solanum lycopersicum
  source 1..101: mol_type = unassigned DNA
cccgactgtcatcagccaaacgataaatattccttcgagaaaagaaatggagtttgtaaacattttgcctcgtctggctatctgaacctagaagaaactcc

SEQ ID NO: 503 - DNA, 101 bp, Solanum lycopersicum
  source 1..101: mol_type = unassigned DNA
cccgactgtcatcagccaaacgataaatattccttcgagaaaagaaatggggtttgtaaacattttgcctcgtctggctatctgaacctagaagaaactcc

SEQ ID NO: 504 - DNA, 101 bp, Solanum lycopersicum
  source 1..101: mol_type = unassigned DNA
gacgctcattgcatctcgcactgatggtggcaaattcctcaagatcttggtagatttatgctatccaaagtgggcactggaagcatttgtcattgcaaatg

SEQ ID NO: 505 - DNA, 101 bp, Solanum lycopersicum
  source 1..101: mol_type = unassigned DNA
gacgctcattgcatctcgcactgatggtggcaaattcctcaagatcttggcagatttatgctatccaaagtgggcactggaagcatttgtcattgcaaatg

SEQ ID NO: 506 - DNA, 101 bp, Solanum lycopersicum
  source 1..101: mol_type = unassigned DNA
gagcttcgtcagagaggtacttctgttgtacctccaggtgaagtgtatggaagatggggtggcatggaatttaaagataaagaaattgtgtggccaccaat

SEQ ID NO: 507 - DNA, 101 bp, Solanum lycopersicum
  source 1..101: mol_type = unassigned DNA
gagcttcgtcagagaggtacttctgttgtacctccaggtgaagtgtatgggagatggggtggcatggaatttaaagataaagaaattgtgtggccaccaat

SEQ ID NO: 508 - DNA, 101 bp, Solanum lycopersicum
  source 1..101: mol_type = unassigned DNA
gtatgatgatcgagccatttgcaatgttttagttggtgacctaagaattcttggtcttctaaaaggtgcaagcatgcgttgtctaattcagaagaaacaac

SEQ ID NO: 509 - DNA, 101 bp, Solanum lycopersicum
  source 1..101: mol_type = unassigned DNA
gtatgatgatcgagccatttgcaatgttttagttggtgacctaagaattcctggtcttctaaaaggtgcaagcatgcgttgtctaattcagaagaaacaac

SEQ ID NO: 510 - DNA, 101 bp, Solanum lycopersicum
  source 1..101: mol_type = unassigned DNA
ggatgaatggagagggacatggtcaatatcgatgcatcgcccaaatgttctgtttttccccttggtgattgttcaattatgatttatgtacaatatatata

SEQ ID NO: 511 - DNA, 101 bp, Solanum lycopersicum
  source 1..101: mol_type = unassigned DNA
ggatgaatggagagggacatggtcaatatcgatgcatcgcccaaatgttcggtttttccccttggtgattgttcaattatgatttatgtacaatatatata

SEQ ID NO: 512 - DNA, 101 bp, Solanum lycopersicum
  source 1..101: mol_type = unassigned DNA
aacttaatcagcagacatctttatacaagaaaatgtggctagcatacaagtaataaagtcaaataaataacaaattggcacaacaaaacaatttgcttaaa

SEQ ID NO: 513 - DNA, 101 bp, Solanum lycopersicum
  source 1..101: mol_type = unassigned DNA
aacttaatcagcagacatctttatacaagaaaatgtggctagcatacaagcaataaagtcaaataaataacaaattggcacaacaaaacaatttgcttaaa

SEQ ID NO: 514 - DNA, 101 bp, Solanum lycopersicum
  source 1..101: mol_type = unassigned DNA
aattggccgcatctacataatgcccagtttttcgtctatgccgactataatctgatacaaacctaaaagtcagtccacaaccctcaaccttgcacttgtat

SEQ ID NO: 515 - DNA, 101 bp, Solanum lycopersicum
  source 1..101: mol_type = unassigned DNA
aattggccgcatctacataatgcccagtttttcgtctatgccgactataacctgatacaaacctaaaagtcagtccacaaccctcaaccttgcacttgtat

SEQ ID NO: 516 - DNA, 101 bp, Solanum lycopersicum
  source 1..101: mol_type = unassigned DNA
gagaaagctagagaagccagagcttcctgctagcattattgagatgagtatattgatgtcgatagtattttcttcaactctatttacctgacagactttga

SEQ ID NO: 517 - DNA, 101 bp, Solanum lycopersicum
  source 1..101: mol_type = unassigned DNA
gagaaagctagagaagccagagcttcctgctagcattattgagatgagtagattgatgtcgatagtattttcttcaactctatttacctgacagactttga

SEQ ID NO: 518 - DNA, 101 bp, Solanum lycopersicum
  source 1..101: mol_type = unassigned DNA
tccccctatacattagccttggaatgactcctcttcatctggcaagacaatagctagtaaagagaacttaacacgaagagaaatcttagccttgtccacta

SEQ ID NO: 519 - DNA, 101 bp, Solanum lycopersicum
  source 1..101: mol_type = unassigned DNA
tccccctatacattagccttggaatgactcctcttcatctggcaagacaacagctagtaaagagaacttaacacgaagagaaatcttagccttgtccacta

SEQ ID NO: 520 - DNA, 101 bp, Solanum lycopersicum
  source 1..101: mol_type = unassigned DNA
attctcaaagtggagctttcgagtgcttcaattgttcaaaaaagagagtgtggctcttattggctggctcccatctgttgttgtttgcctaaggacaaaag

SEQ ID NO: 521 - DNA, 101 bp, Solanum lycopersicum
  source 1..101: mol_type = unassigned DNA
attctcaaagtggagctttcgagtgcttcaattgttcaaaaaagagagtgcggctcttattggctggctcccatctgttgttgtttgcctaaggacaaaag

SEQ ID NO: 522 - DNA, 201 bp, Solanum lycopersicum
  source 1..201: mol_type = unassigned DNA
aagtagaaagtactgccaatgaagttccaaatgatccttccaagatcacaaacatcaaagaaattgccacctatgacagtaaagacatgccttcacttgaacttagtttgaagcaacttcgagatgttggagagaatgggactggtgtgcaagagcgaaatatactcaggcattcagatctgtcagcgttctctaggcatg

SEQ ID NO: 523 - DNA, 201 bp, Solanum lycopersicum
  source 1..201: mol_type = unassigned DNA
aagtagaaagtactgccaatgaagttccaaatgatccttccaagatcacaaacatcaaagaaattgccacctatgacagtaaagacatgccttcacttgagcttagtttgaagcaacttcgagatgttggagagaatgggactggtgtgcaagagcgaaatatactcaggcattcagatctgtcagcgttctctaggcatg

SEQ ID NO: 524 - DNA, 101 bp, Solanum lycopersicum
  source 1..101: mol_type = unassigned DNA
ttttcgcctatagagtcaggtattaagaaagtggcaaaggattttgagcattgttggcctggtaaagctgagagttgtactagtagtgggtatggattaga

SEQ ID NO: 525 - DNA, 101 bp, Solanum lycopersicum
  source 1..101: mol_type = unassigned DNA
ttttcgcctatagagtcaggtattaagaaagtggcaaaggattttgagcactgttggcctggtaaagctgagagttgtactagtagtgggtatggattaga

SEQ ID NO: 526 - DNA, 101 bp, Solanum lycopersicum
  source 1..101: mol_type = unassigned DNA
ctgaaccaaaacaatggactgatggtaaattgagcaagagaatcggaaggagaggaactccatttgtattgagactgctaattgctgttttcccattctta

SEQ ID NO: 527 - DNA, 101 bp, Solanum lycopersicum
  source 1..101: mol_type = unassigned DNA
ctgaaccaaaacaatggactgatggtaaattgagcaagagaatcggaaggggaggaactccatttgtattgagactgctaattgctgttttcccattctta

SEQ ID NO: 528 - DNA, 101 bp, Solanum lycopersicum
  source 1..101: mol_type = unassigned DNA
tgaccatgagagggagaaataatattgtgatatatgaagaagagcttggctaatagtggtggaagtcacagatgaaccaatcttaggcttcaaaagattgt

SEQ ID NO: 529 - DNA, 101 bp, Solanum lycopersicum
  source 1..101: mol_type = unassigned DNA
tgaccatgagagggagaaataatattgtgatatatgaagaagagcttggcgaatagtggtggaagtcacagatgaaccaatcttaggcttcaaaagattgt

SEQ ID NO: 530 - DNA, 101 bp, Solanum lycopersicum
  source 1..101: mol_type = unassigned DNA
ataataagaattgggaaacaattggagtactttgaacaatatcaaaggagagtaagtggtttaattggagcagcacaaacagagcagctagtaaacagtgc

SEQ ID NO: 531 - DNA, 101 bp, Solanum lycopersicum
  source 1..101: mol_type = unassigned DNA
ataataagaattgggaaacaattggagtactttgaacaatatcaaaggagggtaagtggtttaattggagcagcacaaacagagcagctagtaaacagtgc

SEQ ID NO: 532 - DNA, 101 bp, Solanum lycopersicum
  source 1..101: mol_type = unassigned DNA
tcatatcgatctgcatgtctaagcttaagcctaattgacgaattcccatatgattttgcagttgtgtgccagacaccggtaacagcatatcgactccctga

SEQ ID NO: 533 - DNA, 101 bp, Solanum lycopersicum
  source 1..101: mol_type = unassigned DNA
tcatatcgatctgcatgtctaagcttaagcctaattgacgaattcccatacgattttgcagttgtgtgccagacaccggtaacagcatatcgactccctga

SEQ ID NO: 534 - DNA, 101 bp, Solanum lycopersicum
  source 1..101: mol_type = unassigned DNA
acaagcaacagcagcatgtatttaacaaacaaggaactatgtacggttagagtccttaatgctgtcagtcaagatgaagtcactgtaagtatattaatggt

SEQ ID NO: 535 - DNA, 101 bp, Solanum lycopersicum
  source 1..101: mol_type = unassigned DNA
acaagcaacagcagcatgtatttaacaaacaaggaactatgtacggttagggtccttaatgctgtcagtcaagatgaagtcactgtaagtatattaatggt

SEQ ID NO: 536 - DNA, 101 bp, Solanum lycopersicum
  source 1..101: mol_type = unassigned DNA
tttttgtttaatcagatattttgaattcgagctttgttcgttaaaatgtttttgctagggaacgttttatgctaatgtatatttgaaatgatgtgctagaa

SEQ ID NO: 537 - DNA, 101 bp, Solanum lycopersicum
  source 1..101: mol_type = unassigned DNA
tttttgtttaatcagatattttgaattcgagctttgttcgttaaaatgttcttgctagggaacgttttatgctaatgtatatttgaaatgatgtgctagaa

SEQ ID NO: 538 - DNA, 101 bp, Solanum lycopersicum
  source 1..101: mol_type = unassigned DNA
ctagaagcaaaagggtaactagcagcaacagaagcagcagcagctgtggtagccaacttggctgagaaaataccataagaatgaagggtttgaccattaaa

SEQ ID NO: 539 - DNA, 101 bp, Solanum lycopersicum
  source 1..101: mol_type = unassigned DNA
ctagaagcaaaagggtaactagcagcaacagaagcagcagcagctgtggttgccaacttggctgagaaaataccataagaatgaagggtttgaccattaaa

SEQ ID NO: 540 - DNA, 101 bp, Solanum lycopersicum
  source 1..101: mol_type = unassigned DNA
gatgtaacctgaatgtctccttgagcactagttctaagtattccaacttaagtaagtcatcttcctcaaccattctatcaagtcctacaatagaagtcaac

SEQ ID NO: 541 - DNA, 101 bp, Solanum lycopersicum
  source 1..101: mol_type = unassigned DNA
gatgtaacctgaatgtctccttgagcactagttctaagtattccaacttaggtaagtcatcttcctcaaccattctatcaagtcctacaatagaagtcaac

SEQ ID NO: 542 - DNA, 101 bp, Solanum lycopersicum
  source 1..101: mol_type = unassigned DNA
ctgtgtcatttttttttctaacactatactagtctttttgccgccggcggtatgagtttattcaggtaaaagggaaaagggtattcatatataagcctaaa

SEQ ID NO: 543 - DNA, 101 bp, Solanum lycopersicum
  source 1..101: mol_type = unassigned DNA
ctgtgtcatttttttttctaacactatactagtctttttgccgccggcgggatgagtttattcaggtaaaagggaaaagggtattcatatataagcctaaa

SEQ ID NO: 544 - DNA, 101 bp, Solanum lycopersicum
  source 1..101: mol_type = unassigned DNA
agggcaatattactccccttgatcgccattgtagacctttgtgaaatagaacagtttccactcactttacgttttacttctgagaaagtaagcgcccattt

SEQ ID NO: 545 - DNA, 101 bp, Solanum lycopersicum
  source 1..101: mol_type = unassigned DNA
agggcaatattactccccttgatcgccattgtagacctttgtgaaatagagcagtttccactcactttacgttttacttctgagaaagtaagcgcccattt

SEQ ID NO: 546 - DNA, 101 bp, Solanum lycopersicum
  source 1..101: mol_type = unassigned DNA
aactgcacattgtttgcattcagaaggttttggaattcactgtagtctattctatgagaattttcaggatcccactctgtccccttcagctttccctgcat

SEQ ID NO: 547 - DNA, 101 bp, Solanum lycopersicum
  source 1..101: mol_type = unassigned DNA
aactgcacattgtttgcattcagaaggttttggaattcactgtagtctatcctatgagaattttcaggatcccactctgtccccttcagctttccctgcat

SEQ ID NO: 548 - DNA, 101 bp, Solanum lycopersicum
  source 1..101: mol_type = unassigned DNA
gaagcaaatagtgtgcagaggaagagaaaatagagatgtcgaagacgctacttcagcctgtaggccaaaagagacttaccaatgttgctgttgtgcgtctc

SEQ ID NO: 549 - DNA, 101 bp, Solanum lycopersicum
  source 1..101: mol_type = unassigned DNA
gaagcaaatagtgtgcagaggaagagaaaatagagatgtcgaagacgctagttcagcctgtaggccaaaagagacttaccaatgttgctgttgtgcgtctc

SEQ ID NO: 550 - DNA, 101 bp, Solanum lycopersicum
  source 1..101: mol_type = unassigned DNA
gttcccatagtacccaaagaaaagaaggtccctccaactggtgacaaggtaaaaaatggagatttctcaggtgacaataataatgtcaaaaaatgaaagtt

SEQ ID NO: 551 - DNA, 101 bp, Solanum lycopersicum
  source 1..101: mol_type = unassigned DNA
gttcccatagtacccaaagaaaagaaggtccctccaactggtgacaaggtcaaaaatggagatttctcaggtgacaataataatgtcaaaaaatgaaagtt

SEQ ID NO: 552 - DNA, 101 bp, Solanum lycopersicum
  source 1..101: mol_type = unassigned DNA
tcaatacaatacctttaccactattataaagaaaaaggacaaccaggtgcacgaaacatcacatgttcacgcatggtctgaggaagggccacattccaagg

SEQ ID NO: 553 - DNA, 101 bp, Solanum lycopersicum
  source 1..101: mol_type = unassigned DNA
tcaatacaatacctttaccactattataaagaaaaaggacaaccaggtgcgcgaaacatcacatgttcacgcatggtctgaggaagggccacattccaagg

SEQ ID NO: 554 - DNA, 101 bp, Solanum lycopersicum
  source 1..101: mol_type = unassigned DNA
gactctagtggagttgaagtaggagcaatgttggtgatggttattggatatagggtgttagcctacttcctcctaagaaaaatgaaaccaagaacaagcaa

SEQ ID NO: 555 - DNA, 101 bp, Solanum lycopersicum
  source 1..101: mol_type = unassigned DNA
gactctagtggagttgaagtaggagcaatgttggtgatggttattggatacagggtgttagcctacttcctcctaagaaaaatgaaaccaagaacaagcaa

SEQ ID NO: 556 - DNA, 101 bp, Solanum lycopersicum
  source 1..101: mol_type = unassigned DNA
taatattatttgttcattttaagatgaataaagaattaagtctgcaagatctttatggtcaaaccactacccttggaactcattgagattagatcttatat

SEQ ID NO: 557 - DNA, 101 bp, Solanum lycopersicum
  source 1..101: mol_type = unassigned DNA
taatattatttgttcattttaagatgaataaagaattaagtctgcaagatgtttatggtcaaaccactacccttggaactcattgagattagatcttatat

SEQ ID NO: 558 - DNA, 101 bp, Solanum lycopersicum
  source 1..101: mol_type = unassigned DNA
atgttttaccaagtactatctgctgcaagttgttttttctttaatctagacactccagatcaagtttatttagaacacaaaaaaccatagaagaaaaaggt

SEQ ID NO: 559 - DNA, 101 bp, Solanum lycopersicum
  source 1..101: mol_type = unassigned DNA
atgttttaccaagtactatctgctgcaagttgttttttctttaatctagagactccagatcaagtttatttagaacacaaaaaaccatagaagaaaaaggt

SEQ ID NO: 560 - DNA, 101 bp, Solanum lycopersicum
  source 1..101: mol_type = unassigned DNA
tgattacacgtgcaatcctctggagaagctccaatactagagaaggcgacaaatttgtcctagatgtcgcaacaaaaagcagaccaactaccttcacatgg

SEQ ID NO: 561 - DNA, 101 bp, Solanum lycopersicum
  source 1..101: mol_type = unassigned DNA
tgattacacgtgcaatcctctggagaagctccaatactagagaaggcgaccaatttgtcctagatgtcgcaacaaaaagcagaccaactaccttcacatgg

SEQ ID NO: 562 - DNA, 101 bp, Solanum lycopersicum
  source 1..101: mol_type = unassigned DNA
tggacttccaaaccaactggtgcctttatacttgctgtgtatgttgcgtcttcttgtcctacgttagttacagttcttgttactttcttgatttcattttc

SEQ ID NO: 563 - DNA, 101 bp, Solanum lycopersicum
  source 1..101: mol_type = unassigned DNA
tggacttccaaaccaactggtgcctttatacttgctgtgtatgttgcgtcgtcttgtcctacgttagttacagttcttgttactttcttgatttcattttc

SEQ ID NO: 564 - DNA, 101 bp, Solanum lycopersicum
  source 1..101: mol_type = unassigned DNA
tgtttttttatcatattgctctgaaaaacaaaatatggagtgatggagcattgtggacaagtaaactccaccccatccaaataatacaccagaaaagtaca

SEQ ID NO: 565 - DNA, 101 bp, Solanum lycopersicum
  source 1..101: mol_type = unassigned DNA
tgtttttttatcatattgctctgaaaaacaaaatatggagtgatggagcagtgtggacaagtaaactccaccccatccaaataatacaccagaaaagtaca

SEQ ID NO: 566 - DNA, 101 bp, Solanum lycopersicum
  source 1..101: mol_type = unassigned DNA
agatatttttaaaattggatgattttttttcgagtgattttgggcgttccattttcctgggtttattgagtttcttcctctgtttgatctgaccaatgcac

SEQ ID NO: 567 - DNA, 101 bp, Solanum lycopersicum
  source 1..101: mol_type = unassigned DNA
agatatttttaaaattggatgattttttttcgagtgattttgggcgttccgttttcctgggtttattgagtttcttcctctgtttgatctgaccaatgcac

SEQ ID NO: 568 - DNA, 101 bp, Solanum lycopersicum
  source 1..101: mol_type = unassigned DNA
tccaggtagtcttttggtacttccatttcagatagtgtgctggcattgattgcctgagctgccttgaaaatttgatttgtgcattccctacactgccgcaa

SEQ ID NO: 569 - DNA, 101 bp, Solanum lycopersicum
  source 1..101: mol_type = unassigned DNA
tccaggtagtcttttggtacttccatttcagatagtgtgctggcattgatcgcctgagctgccttgaaaatttgatttgtgcattccctacactgccgcaa

SEQ ID NO: 570 - DNA, 101 bp, Solanum lycopersicum
  source 1..101: mol_type = unassigned DNA
ccggttcacatttcgtcattcagctaaatctctggccaaagttgacgccattcactctcctttgctccttccgatctcaatctccggtgaactcctgcgtg

SEQ ID NO: 571 - DNA, 101 bp, Solanum lycopersicum
  source 1..101: mol_type = unassigned DNA
ccggttcacatttcgtcattcagctaaatctctggccaaagttgacgccactcactctcctttgctccttccgatctcaatctccggtgaactcctgcgtg

SEQ ID NO: 572 - DNA, 101 bp, Solanum lycopersicum
  source 1..101: mol_type = unassigned DNA
accaaataaacaagaaaaaaaatgatttttggagctcagaagaaagaagaaccaaaagggtcgattccttttccttctagaaatgtaaaaacctaattatt

SEQ ID NO: 573 - DNA, 101 bp, Solanum lycopersicum
  source 1..101: mol_type = unassigned DNA
accaaataaacaagaaaaaaaatgatttttggagctcagaagaaagaagagccaaaagggtcgattccttttccttctagaaatgtaaaaacctaattatt

SEQ ID NO: 574 - DNA, 101 bp, Solanum lycopersicum
  source 1..101: mol_type = unassigned DNA
attggcttggtctaaatgagttctctgatttgagccatgatgagtttaagaaaatgtatttaggactgaaagttgatcaagagttgcttaataaaagagag

SEQ ID NO: 575 - DNA, 101 bp, Solanum lycopersicum
  source 1..101: mol_type = unassigned DNA
attggcttggtctaaatgagttctctgatttgagccatgatgagtttaaggaaatgtatttaggactgaaagttgatcaagagttgcttaataaaagagag

SEQ ID NO: 576 - DNA, 101 bp, Solanum lycopersicum
  source 1..101: mol_type = unassigned DNA
aacttgctattaggattgttccaagcaggtgcagctgcttttagaaaaagaaaaacccctctttcattgactggttgtgatgactactatcattcgccata

SEQ ID NO: 577 - DNA, 101 bp, Solanum lycopersicum
  source 1..101: mol_type = unassigned DNA
aacttgctattaggattgttccaagcaggtgcagctgcttttagaaaaaggaaaacccctctttcattgactggttgtgatgactactatcattcgccata

SEQ ID NO: 578 - DNA, 101 bp, Solanum lycopersicum
  source 1..101: mol_type = unassigned DNA
tctggaagacatgttggaggatcgtacgtgtatggttcaaagggattgtctaacagaaaataactggacgacgggctgcatgagttatcacattgatagga

SEQ ID NO: 579 - DNA, 101 bp, Solanum lycopersicum
  source 1..101: mol_type = unassigned DNA
tctggaagacatgttggaggatcgtacgtgtatggttcaaagggattgtcgaacagaaaataactggacgacgggctgcatgagttatcacattgatagga

SEQ ID NO: 580 - DNA, 101 bp, Solanum lycopersicum
  source 1..101: mol_type = unassigned DNA
agcgatttcagggacgaagaatgctcaaaacaataagggatgttcttgagatgctggcatcttttcagttccaagcgttcaaggcatggaaaggcatcatc

SEQ ID NO: 581 - DNA, 101 bp, Solanum lycopersicum
  source 1..101: mol_type = unassigned DNA
agcgatttcagggacgaagaatgctcaaaacaataagggatgttcttgaggtgctggcatcttttcagttccaagcgttcaaggcatggaaaggcatcatc

SEQ ID NO: 582 - DNA, 101 bp, Solanum lycopersicum
  source 1..101: mol_type = unassigned DNA
cctttggcaagttatcttacgatagaacagaaaacattgcactgaaagaattgccaagatatagatctcccaaaatcagcaatcttctctgcaacttcaac

SEQ ID NO: 583 - DNA, 101 bp, Solanum lycopersicum
  source 1..101: mol_type = unassigned DNA
cctttggcaagttatcttacgatagaacagaaaacattgcactgaaagaactgccaagatatagatctcccaaaatcagcaatcttctctgcaacttcaac

SEQ ID NO: 584 - DNA, 101 bp, Solanum lycopersicum
  source 1..101: mol_type = unassigned DNA
attcaactatagcatgggttggttgtgtgggcaaaggcagagtccctaacatgagctacgcgtacaagacaacaagttcagtggactacatgttccgcgtc

SEQ ID NO: 585 - DNA, 101 bp, Solanum lycopersicum
  source 1..101: mol_type = unassigned DNA
attcaactatagcatgggttggttgtgtgggcaaaggcagagtccctaacgtgagctacgcgtacaagacaacaagttcagtggactacatgttccgcgtc

SEQ ID NO: 586 - DNA, 101 bp, Solanum lycopersicum
  source 1..101: mol_type = unassigned DNA
caaaatcccaaaattacccttcctcctacaccgccctatcctacacacttatgtcctcattcgtctttttacaatctgagtctcactgtctccaactcact

SEQ ID NO: 587 - DNA, 101 bp, Solanum lycopersicum
  source 1..101: mol_type = unassigned DNA
caaaatcccaaaattacccttcctcctacaccgccctatcctacacacttgtgtcctcattcgtctttttacaatctgagtctcactgtctccaactcact

SEQ ID NO: 588 - DNA, 101 bp, Solanum lycopersicum
  source 1..101: mol_type = unassigned DNA
attctactactgttccataacccattgtgttcaattggactcattttgagatccatgaatcgccagagctttcgattagatcctcttttttttctttgttt

SEQ ID NO: 589 - DNA, 101 bp, Solanum lycopersicum
  source 1..101: mol_type = unassigned DNA
attctactactgttccataacccattgtgttcaattggactcattttgagctccatgaatcgccagagctttcgattagatcctcttttttttctttgttt

SEQ ID NO: 590 - DNA, 101 bp, Solanum lycopersicum
  source 1..101: mol_type = unassigned DNA
aatgaagttgaagcaatatctttcgagaatgatgagatttctcctgaatcaattgagaaagttctgtcgttggatcacttatctatcattttgaactctga

SEQ ID NO: 591 - DNA, 101 bp, Solanum lycopersicum
  source 1..101: mol_type = unassigned DNA
aatgaagttgaagcaatatctttcgagaatgatgagatttctcctgaatcgattgagaaagttctgtcgttggatcacttatctatcattttgaactctga

SEQ ID NO: 592 - DNA, 101 bp, Solanum lycopersicum
  source 1..101: mol_type = unassigned DNA
atttcccgccaaatcctcatcgatccgatcaaatcgactaccgtcaccactggcgcgaacatctctatttccgtgcggttgaaaattccagccgaattcgg

SEQ ID NO: 593 - DNA, 101 bp, Solanum lycopersicum
  source 1..101: mol_type = unassigned DNA
atttcccgccaaatcctcatcgatccgatcaaatcgactaccgtcaccaccggcgcgaacatctctatttccgtgcggttgaaaattccagccgaattcgg

SEQ ID NO: 594 - DNA, 101 bp, Solanum lycopersicum
  source 1..101: mol_type = unassigned DNA
atgtttcaaaagctgctgctgaagcaaggaaaaaatcgaaaattcttcagtcagtggtgagaaacaaagaaccttacattcttgaaacaaatagcagttta

SEQ ID NO: 595 - DNA, 101 bp, Solanum lycopersicum
  source 1..101: mol_type = unassigned DNA
atgtttcaaaagctgctgctgaagcaaggaaaaaatcgaaaattcttcagccagtggtgagaaacaaagaaccttacattcttgaaacaaatagcagttta

SEQ ID NO: 596 - DNA, 101 bp, Solanum lycopersicum
  source 1..101: mol_type = unassigned DNA
aaatacgagtttgcatattttcgtccatgtttttaatcttttcaatgtgcttgttgtgatatgactttctatgcaatcattggttcttgagtgaattcact

SEQ ID NO: 597 - DNA, 101 bp, Solanum lycopersicum
  source 1..101: mol_type = unassigned DNA
aaatacgagtttgcatattttcgtccatgtttttaatcttttcaatgtgcctgttgtgatatgactttctatgcaatcattggttcttgagtgaattcact

SEQ ID NO: 598 - DNA, 101 bp, Solanum lycopersicum
  source 1..101: mol_type = unassigned DNA
atgaccaagttgtgggtagctgaagggtttgtacaagcaaacaacgaaaaaggacaagaagataccgcacaaggtttcttggacgatcttattggtaggaa

SEQ ID NO: 599 - DNA, 101 bp, Solanum lycopersicum
  source 1..101: mol_type = unassigned DNA
atgaccaagttgtgggtagctgaagggtttgtacaagcaaacaacgaaaatggacaagaagataccgcacaaggtttcttggacgatcttattggtaggaa

SEQ ID NO: 600 - DNA, 101 bp, Solanum lycopersicum
  source 1..101: mol_type = unassigned DNA
caggggcaatgtagcctatatttcctctcactactgtgctaagatgggttagatcaagctcgggcattgtcttagatattccaaaatcagtaatttttggc

SEQ ID NO: 601 - DNA, 101 bp, Solanum lycopersicum
  source 1..101: mol_type = unassigned DNA
caggggcaatgtagcctatatttcctctcactactgtgctaagatgggtttgatcaagctcgggcattgtcttagatattccaaaatcagtaatttttggc

SEQ ID NO: 602 - DNA, 101 bp, Solanum lycopersicum
  source 1..101: mol_type = unassigned DNA
gttaatgccagtgaaaagtctacttccacttctcctgtggatctattaggtttggctaactatgcgtcagatgatgaggatgacaatgaaatccagagttc

SEQ ID NO: 603 - DNA, 101 bp, Solanum lycopersicum
  source 1..101: mol_type = unassigned DNA
gttaatgccagtgaaaagtctacttccacttctcctgtggatctattaggcttggctaactatgcgtcagatgatgaggatgacaatgaaatccagagttc

SEQ ID NO: 604 - DNA, 101 bp, Solanum lycopersicum
  source 1..101: mol_type = unassigned DNA
gagctgctaaccaaggctccaccatagaagccccaaatccatccacaatttgccttcccctatgcttctcttcattaacaatcctcttatccaaacttgac

SEQ ID NO: 605 - DNA, 101 bp, Solanum lycopersicum
  source 1..101: mol_type = unassigned DNA
gagctgctaaccaaggctccaccatagaagccccaaatccatccacaattcgccttcccctatgcttctcttcattaacaatcctcttatccaaacttgac

SEQ ID NO: 606 - DNA, 101 bp, Solanum lycopersicum
  source 1..101: mol_type = unassigned DNA
cggttattgaagaacagttcttcagcattttcaaatctggtggcagaatttttgcggagatcatccaaggggttaacctaaaagcatagcacatttgatag

SEQ ID NO: 607 - DNA, 101 bp, Solanum lycopersicum
  source 1..101: mol_type = unassigned DNA
cggttattgaagaacagttcttcagcattttcaaatctggtggcagaattcttgcggagatcatccaaggggttaacctaaaagcatagcacatttgatag

SEQ ID NO: 608 - DNA, 101 bp, Solanum lycopersicum
  source 1..101: mol_type = unassigned DNA
tgggatgcttccaaactatgtcgtctatcatgaattaatagttacatcacacccatttatgcgtaatgtatgtgcagttgagatgcgatgggttgcaccaa

SEQ ID NO: 609 - DNA, 101 bp, Solanum lycopersicum
  source 1..101: mol_type = unassigned DNA
tgggatgcttccaaactatgtcgtctatcatgaattaatagttacatcacgcccatttatgcgtaatgtatgtgcagttgagatgcgatgggttgcaccaa

SEQ ID NO: 610 - DNA, 101 bp, Solanum lycopersicum
  source 1..101: mol_type = unassigned DNA
atgcctctgagagattctaaccctggtaatacagcaagtacgactggttatgcagttcctggcatgatgcaagtaatagctaccactagtggagatagacc

SEQ ID NO: 611 - DNA, 101 bp, Solanum lycopersicum
  source 1..101: mol_type = unassigned DNA
atgcctctgagagattctaaccctggtaatacagcaagtacgactggttacgcagttcctggcatgatgcaagtaatagctaccactagtggagatagacc

SEQ ID NO: 612 - DNA, 101 bp, Solanum lycopersicum
  source 1..101: mol_type = unassigned DNA
tcactttcatagatctcctcaatcgattcgggaatatctgcttgaaactgtggcccaacaggtattctctttctgcgctgcttccaccaaaaaccaattgc

SEQ ID NO: 613 - DNA, 101 bp, Solanum lycopersicum
  source 1..101: mol_type = unassigned DNA
tcactttcatagatctcctcaatcgattcgggaatatctgcttgaaactgcggcccaacaggtattctctttctgcgctgcttccaccaaaaaccaattgc

SEQ ID NO: 614 - DNA, 101 bp, Solanum lycopersicum
  source 1..101: mol_type = unassigned DNA
taataaaatggatttggagacgagtgagatttcaaattacaagtcatcagtagttttgtctaagttggctagtaacgaacaacatggtgaaaactcaccat

SEQ ID NO: 615 - DNA, 101 bp, Solanum lycopersicum
  source 1..101: mol_type = unassigned DNA
taataaaatggatttggagacgagtgagatttcaaattacaagtcatcagcagttttgtctaagttggctagtaacgaacaacatggtgaaaactcaccat

SEQ ID NO: 616 - DNA, 101 bp, Solanum lycopersicum
  source 1..101: mol_type = unassigned DNA
gcgattgcaaaatttatggagaaaacaagaggtggtaaggttaagtttgatgctaaacgtgtagtaatggctggtggagctactggagctaatgagactct

SEQ ID NO: 617 - DNA, 101 bp, Solanum lycopersicum
  source 1..101: mol_type = unassigned DNA
gcgattgcaaaatttatggagaaaacaagaggtggtaaggttaagtttgacgctaaacgtgtagtaatggctggtggagctactggagctaatgagactct

SEQ ID NO: 618 - DNA, 101 bp, Solanum lycopersicum
  source 1..101: mol_type = unassigned DNA
ctgcgttctatgcacttccttcatcacattgttgtgcaacatcgctaaacacagttggattaatgcaacattttcgaagaaaagccaacaactcctcttta

SEQ ID NO: 619 - DNA, 101 bp, Solanum lycopersicum
  source 1..101: mol_type = unassigned DNA
ctgcgttctatgcacttccttcatcacattgttgtgcaacatcgctaaactcagttggattaatgcaacattttcgaagaaaagccaacaactcctcttta

SEQ ID NO: 620 - DNA, 101 bp, Solanum lycopersicum
  source 1..101: mol_type = unassigned DNA
taaggtttccagacaattgtggtctcagcaatcatggatgtaacagtgtaaggatccatgttcgaagcaggcctcctgtcctcgaaatatcccttccctgc

SEQ ID NO: 621 - DNA, 101 bp, Solanum lycopersicum
  source 1..101: mol_type = unassigned DNA
taaggtttccagacaattgtggtctcagcaatcatggatgtaacagtgtagggatccatgttcgaagcaggcctcctgtcctcgaaatatcccttccctgc

SEQ ID NO: 622 - DNA, 101 bp, Solanum lycopersicum
  source 1..101: mol_type = unassigned DNA
ttactatgcaatttcaagaaaagggttcatgaactagaagctgaagtagcaaatagacgattaacggagtccaaaatattcgattcgttggcctcacagac

SEQ ID NO: 623 - DNA, 101 bp, Solanum lycopersicum
  source 1..101: mol_type = unassigned DNA
ttactatgcaatttcaagaaaagggttcatgaactagaagctgaagtagcgaatagacgattaacggagtccaaaatattcgattcgttggcctcacagac

SEQ ID NO: 624 - DNA, 101 bp, Solanum lycopersicum
  source 1..101: mol_type = unassigned DNA
aattcaattggtcttgtttgtttggcccaataggccaatgtggagtgttaatataattggagattcggggttttttcttcttcttttcaattgtgggggat

SEQ ID NO: 625 - DNA, 101 bp, Solanum lycopersicum
  source 1..101: mol_type = unassigned DNA
aattcaattggtcttgtttgtttggcccaataggccaatgtggagtgttactataattggagattcggggttttttcttcttcttttcaattgtgggggat

SEQ ID NO: 626 - DNA, 101 bp, Solanum lycopersicum
  source 1..101: mol_type = unassigned DNA
caaagttatcctcccggagtgcaatctcataatagtgctcctgttcaatctcttcctagttatgcctatggcaattccgtcgctgcaatgccaccccatac

SEQ ID NO: 627 - DNA, 101 bp, Solanum lycopersicum
  source 1..101: mol_type = unassigned DNA
caaagttatcctcccggagtgcaatctcataatagtgctcctgttcaatcgcttcctagttatgcctatggcaattccgtcgctgcaatgccaccccatac

SEQ ID NO: 628 - DNA, 101 bp, Solanum lycopersicum
  source 1..101: mol_type = unassigned DNA
ctaattccctgtttaactgaaaaatggggagatttaccactaaaagtcgatgattccgaagatatggtaatttacggtctattaaaagacgctctaagcgt

SEQ ID NO: 629 - DNA, 101 bp, Solanum lycopersicum
  source 1..101: mol_type = unassigned DNA
ctaattccctgtttaactgaaaaatggggagatttaccactaaaagtcgacgattccgaagatatggtaatttacggtctattaaaagacgctctaagcgt

SEQ ID NO: 630 - DNA, 101 bp, Solanum lycopersicum
  source 1..101: mol_type = unassigned DNA
tcggatgttatcagtgtgtgtacagtaaaacctctggtcttatgtgtactatggagtatcattgtaatagcagtacaagctttgaaatggactctacttgt

SEQ ID NO: 631 - DNA, 101 bp, Solanum lycopersicum
  source 1..101: mol_type = unassigned DNA
tcggatgttatcagtgtgtgtacagtaaaacctctggtcttatgtgtactgtggagtatcattgtaatagcagtacaagctttgaaatggactctacttgt

SEQ ID NO: 632 - DNA, 101 bp, Solanum lycopersicum
  source 1..101: mol_type = unassigned DNA
tacactttgtgctattttcagatgaaatttatgatgcatgggtgacagcaacgaatgaacagttgaattgattagtatgtttacgagtatttgcaagacgg

SEQ ID NO: 633 - DNA, 101 bp, Solanum lycopersicum
  source 1..101: mol_type = unassigned DNA
tacactttgtgctattttcagatgaaatttatgatgcatgggtgacagcagcgaatgaacagttgaattgattagtatgtttacgagtatttgcaagacgg

SEQ ID NO: 634 - DNA, 101 bp, Solanum lycopersicum
  source 1..101: mol_type = unassigned DNA
taataaaccttagcaaagttgccttgacctaataatctccccaaatcgtatttttccatcagtacatttccttttttctccatttgaaccaacaattcttg

SEQ ID NO: 635 - DNA, 101 bp, Solanum lycopersicum
  source 1..101: mol_type = unassigned DNA
taataaaccttagcaaagttgccttgacctaataatctccccaaatcgtacttttccatcagtacatttccttttttctccatttgaaccaacaattcttg

SEQ ID NO: 636 - DNA, 101 bp, Solanum lycopersicum
  source 1..101: mol_type = unassigned DNA
caattttaactcaataacaggaaatcacacctaatccaggacacgacgcttgttcagatgtatctacggaataatagcaaccacagataacacgaccccaa

SEQ ID NO: 637 - DNA, 101 bp, Solanum lycopersicum
  source 1..101: mol_type = unassigned DNA
caattttaactcaataacaggaaatcacacctaatccaggacacgacgctcgttcagatgtatctacggaataatagcaaccacagataacacgaccccaa

SEQ ID NO: 638 - DNA, 101 bp, Solanum lycopersicum
  source 1..101: mol_type = unassigned DNA
ggccctagcaaattattcgccatctcccttagcacatgcttcagttcattcccatcattaattactgaacacccgctcaaaggtgaaccataagtgttgtc

SEQ ID NO: 639 - DNA, 101 bp, Solanum lycopersicum
  source 1..101: mol_type = unassigned DNA
ggccctagcaaattattcgccatctcccttagcacatgcttcagttcattgccatcattaattactgaacacccgctcaaaggtgaaccataagtgttgtc

SEQ ID NO: 640 - DNA, 101 bp, Solanum lycopersicum
  source 1..101: mol_type = unassigned DNA
aaattccggttttgtataccgatgatgaaaacactctagctaggtgtgttatggggtttaaacttttttggggtatttgatgtccattgttgattttgaac

SEQ ID NO: 641 - DNA, 101 bp, Solanum lycopersicum
  source 1..101: mol_type = unassigned DNA
aaattccggttttgtataccgatgatgaaaacactctagctaggtgtgttgtggggtttaaacttttttggggtatttgatgtccattgttgattttgaac

SEQ ID NO: 642 - DNA, 101 bp, Solanum lycopersicum
  source 1..101: mol_type = unassigned DNA
tactctgttgaacctgctgaaagcaggaggcctttccgtgctctcttggatgtcggcctcttaagaactactacagggaaccgtgtttttggtgctctcaa

SEQ ID NO: 643 - DNA, 101 bp, Solanum lycopersicum
  source 1..101: mol_type = unassigned DNA
tactctgttgaacctgctgaaagcaggaggcctttccgtgctctcttggacgtcggcctcttaagaactactacagggaaccgtgtttttggtgctctcaa

SEQ ID NO: 644 - DNA, 101 bp, Solanum lycopersicum
  source 1..101: mol_type = unassigned DNA
atatagatctgtgtgaaaggcatcatatgttagctctctgttattacggaaaaggagataatttcaccgccttgaacttgttgcggaaactattgagtagt

SEQ ID NO: 645 - DNA, 101 bp, Solanum lycopersicum
  source 1..101: mol_type = unassigned DNA
atatagatctgtgtgaaaggcatcatatgttagctctctgttattacggagaaggagataatttcaccgccttgaacttgttgcggaaactattgagtagt

SEQ ID NO: 646 - DNA, 101 bp, Solanum lycopersicum
  source 1..101: mol_type = unassigned DNA
cggcgaaattccagtagacattcagggtctgagtaatttgagagcattgaacttggggagaaataagttcatgggtgaaattccagatgaaattggaggtt

SEQ ID NO: 647 - DNA, 101 bp, Solanum lycopersicum
  source 1..101: mol_type = unassigned DNA
cggcgaaattccagtagacattcagggtctgagtaatttgagagcattgagcttggggagaaataagttcatgggtgaaattccagatgaaattggaggtt

SEQ ID NO: 648 - DNA, 101 bp, Solanum lycopersicum
  source 1..101: mol_type = unassigned DNA
acaatacatgagaggaacaaattaagtaagatcatcttcctcaagctccttcgccttcaatgtttccttgactcttagaagtagtgttgtcctccaagcat

SEQ ID NO: 649 - DNA, 101 bp, Solanum lycopersicum
  source 1..101: mol_type = unassigned DNA
acaatacatgagaggaacaaattaagtaagatcatcttcctcaagctcctccgccttcaatgtttccttgactcttagaagtagtgttgtcctccaagcat

SEQ ID NO: 650 - DNA, 101 bp, Solanum lycopersicum
  source 1..101: mol_type = unassigned DNA
ataagtgtccacttgaccataatgcccttgtgagatgggtgtggaggatgagtcccacatgttcaagggcataggttggtgatgctgatgaggtggaccaa

SEQ ID NO: 651 - DNA, 101 bp, Solanum lycopersicum
  source 1..101: mol_type = unassigned DNA
ataagtgtccacttgaccataatgcccttgtgagatgggtgtggaggatgggtcccacatgttcaagggcataggttggtgatgctgatgaggtggaccaa

SEQ ID NO: 652 - DNA, 101 bp, Solanum lycopersicum
  source 1..101: mol_type = unassigned DNA
cccattctttgtttctacacacaattcaaaatcccctcctccctctcttttcccccctttgaactctgcagccgtacgccactctcattttcctgcgaatt

SEQ ID NO: 653 - DNA, 101 bp, Solanum lycopersicum
  source 1..101: mol_type = unassigned DNA
cccattctttgtttctacacacaattcaaaatcccctcctccctctctttccccccctttgaactctgcagccgtacgccactctcattttcctgcgaatt

SEQ ID NO: 654 - DNA, 101 bp, Solanum lycopersicum
  source 1..101: mol_type = unassigned DNA
cagtaaaaatgcttgcaaagggcagaagacctcccaccagagaaataacatatggtcttaggtaccatttcttctcagggataggacgcggaatattctta

SEQ ID NO: 655 - DNA, 101 bp, Solanum lycopersicum
  source 1..101: mol_type = unassigned DNA
cagtaaaaatgcttgcaaagggcagaagacctcccaccagagaaataacagatggtcttaggtaccatttcttctcagggataggacgcggaatattctta

SEQ ID NO: 656 - DNA, 101 bp, Solanum lycopersicum
  source 1..101: mol_type = unassigned DNA
atcatctttcttctccggattgggagaaaatacccctgctgtaacaagtgtggtaagtacaagagaaatggcgaaaacattcatcatcttttccaattagt

SEQ ID NO: 657 - DNA, 101 bp, Solanum lycopersicum
  source 1..101: mol_type = unassigned DNA
atcatctttcttctccggattgggagaaaatacccctgctgtaacaagtgcggtaagtacaagagaaatggcgaaaacattcatcatcttttccaattagt

SEQ ID NO: 658 - DNA, 101 bp, Solanum lycopersicum
  source 1..101: mol_type = unassigned DNA
tgggtgctcaatggtcagatgaccatctgagtgtgagaaatatgcactccttcacaagcagcaggcctatcagagtgctgctcatgcgtggttcagcagag

SEQ ID NO: 659 - DNA, 101 bp, Solanum lycopersicum
  source 1..101: mol_type = unassigned DNA
tgggtgctcaatggtcagatgaccatctgagtgtgagaaatatgcactccgtcacaagcagcaggcctatcagagtgctgctcatgcgtggttcagcagag

SEQ ID NO: 660 - DNA, 101 bp, Solanum lycopersicum
  source 1..101: mol_type = unassigned DNA
gtgcattttttccatgatggacaaggtttcatgtctgttgagttgacaccaacagaggctgagatcaaatattatgatgtttttggtagaattagacatag

SEQ ID NO: 661 - DNA, 101 bp, Solanum lycopersicum
  source 1..101: mol_type = unassigned DNA
gtgcattttttccatgatggacaaggtttcatgtctgttgagttgacaccgacagaggctgagatcaaatattatgatgtttttggtagaattagacatag

SEQ ID NO: 662 - DNA, 101 bp, Solanum lycopersicum
  source 1..101: mol_type = unassigned DNA
agttaattcttgtgctgcttgctatattttgaggcctgttggacgcaacaaactagtaaaataggatcttagtcatgtattgcctcaagaatttgtgtttc

SEQ ID NO: 663 - DNA, 101 bp, Solanum lycopersicum
  source 1..101: mol_type = unassigned DNA
agttaattcttgtgctgcttgctatattttgaggcctgttggacgcaacatactagtaaaataggatcttagtcatgtattgcctcaagaatttgtgtttc

SEQ ID NO: 664 - DNA, 101 bp, Solanum lycopersicum
  source 1..101: mol_type = unassigned DNA
ggcccggataagattagtaaaatatatggcgactggattgatgacatcgaatgaaggagttgtcataattagctactgatctgtttagctagacacaaata

SEQ ID NO: 665 - DNA, 101 bp, Solanum lycopersicum
  source 1..101: mol_type = unassigned DNA
ggcccggataagattagtaaaatatatggcgactggattgatgacatcgagtgaaggagttgtcataattagctactgatctgtttagctagacacaaata

SEQ ID NO: 666 - DNA, 101 bp, Solanum lycopersicum
  source 1..101: mol_type = unassigned DNA
ggtcggaagcaattgatggggcaagaatcggtcggaaatggagttctaggacatttatcttcgtcgtcttgatgagaaggtagtggatttaaaccgtttaa

SEQ ID NO: 667 - DNA, 101 bp, Solanum lycopersicum
  source 1..101: mol_type = unassigned DNA
ggtcggaagcaattgatggggcaagaatcggtcggaaatggagttctagggcatttatcttcgtcgtcttgatgagaaggtagtggatttaaaccgtttaa

SEQ ID NO: 668 - DNA, 101 bp, Solanum lycopersicum
  source 1..101: mol_type = unassigned DNA
tatgtagctaggaagagagttgaaaagacctagcttacaaaagatgggggaaaaaagggggagatgataaataaggtataagtttttgagagatgaatgaa

SEQ ID NO: 669 - DNA, 101 bp, Solanum lycopersicum
  source 1..101: mol_type = unassigned DNA
tatgtagctaggaagagagttgaaaagacctagcttacaaaagatggggggaaaaagggggagatgataaataaggtataagtttttgagagatgaatgaa

SEQ ID NO: 670 - DNA, 101 bp, Solanum lycopersicum
  source 1..101: mol_type = unassigned DNA
caacacctgtacaggatacatctgcagaagaattgttgtccagaaagatgacaggcaataggttggcagaatctttatggccctcaacaatgaggagtctg

SEQ ID NO: 671 - DNA, 101 bp, Solanum lycopersicum
  source 1..101: mol_type = unassigned DNA
caacacctgtacaggatacatctgcagaagaattgttgtccagaaagatggcaggcaataggttggcagaatctttatggccctcaacaatgaggagtctg

SEQ ID NO: 672 - DNA, 101 bp, Solanum lycopersicum
  source 1..101: mol_type = unassigned DNA
gtctcctatgctcttcctgtctcctttgtttcaagtggtatcatgcgttcagagacagaagttgaggagaaatcaatcgaaacaacccagacaaccaccat

SEQ ID NO: 673 - DNA, 101 bp, Solanum lycopersicum
  source 1..101: mol_type = unassigned DNA
gtctcctatgctcttcctgtctcctttgtttcaagtggtatcatgcgttcggagacagaagttgaggagaaatcaatcgaaacaacccagacaaccaccat

SEQ ID NO: 674 - DNA, 101 bp, Solanum lycopersicum
  source 1..101: mol_type = unassigned DNA
atctcaggaacttctctaaagaacgtatcttgtcttccaggatttgcatgatctcaccaggaagtcggcagacaactactacattgtcaaatgcttctgaa

SEQ ID NO: 675 - DNA, 101 bp, Solanum lycopersicum
  source 1..101: mol_type = unassigned DNA
atctcaggaacttctctaaagaacgtatcttgtcttccaggatttgcatggtctcaccaggaagtcggcagacaactactacattgtcaaatgcttctgaa

SEQ ID NO: 676 - DNA, 101 bp, Solanum lycopersicum
  source 1..101: mol_type = unassigned DNA
gacagctccacttgcagcagaaagtgtgactccaacaaagcgaaacagaaaatcttcagcttctaagaaggacgtgaaagacaaaaaagaacaggaagaaa

SEQ ID NO: 677 - DNA, 101 bp, Solanum lycopersicum
  source 1..101: mol_type = unassigned DNA
gacagctccacttgcagcagaaagtgtgactccaacaaagcgaaacagaagatcttcagcttctaagaaggacgtgaaagacaaaaaagaacaggaagaaa

SEQ ID NO: 678 - DNA, 101 bp, Solanum lycopersicum
  source 1..101: mol_type = unassigned DNA
catgaagttgggatacacgaatgcatataaagcttttgatccaagtcgatcaaaatcttggtccttccccgcactaccagtttcacatcgttggatgctga

SEQ ID NO: 679 - DNA, 101 bp, Solanum lycopersicum
  source 1..101: mol_type = unassigned DNA
catgaagttgggatacacgaatgcatataaagcttttgatccaagtcgatgaaaatcttggtccttccccgcactaccagtttcacatcgttggatgctga

SEQ ID NO: 680 - DNA, 101 bp, Solanum lycopersicum
  source 1..101: mol_type = unassigned DNA
tcttttgtcagaaggaatcaactcgggggttgatggagccagaagcatctagtggtggttagctaggctgttaatcatccaacaaaagttgttagatgatc

SEQ ID NO: 681 - DNA, 101 bp, Solanum lycopersicum
  source 1..101: mol_type = unassigned DNA
tcttttgtcagaaggaatcaactcgggggttgatggagccagaagcatctcgtggtggttagctaggctgttaatcatccaacaaaagttgttagatgatc

SEQ ID NO: 682 - DNA, 101 bp, Solanum lycopersicum
  source 1..101: mol_type = unassigned DNA
ctactctttcacaatacattcaagtggtgaagttcacatagtgtgcctcatcacttttattcatgctacatgcattacttaattttattcataagttacac

SEQ ID NO: 683 - DNA, 101 bp, Solanum lycopersicum
  source 1..101: mol_type = unassigned DNA
ctactctttcacaatacattcaagtggtgaagttcacatagtgtgcctcaccacttttattcatgctacatgcattacttaattttattcataagttacac

SEQ ID NO: 684 - DNA, 101 bp, Solanum lycopersicum
  source 1..101: mol_type = unassigned DNA
accttcctccatgccacaaagttcccagaacctccaccacgataagttctagtatcacagaagtcgaagttgaagaaataactattttgggagcttattgg

SEQ ID NO: 685 - DNA, 101 bp, Solanum lycopersicum
  source 1..101: mol_type = unassigned DNA
accttcctccatgccacaaagttcccagaacctccaccacgataagttctggtatcacagaagtcgaagttgaagaaataactattttgggagcttattgg

SEQ ID NO: 686 - DNA, 101 bp, Solanum lycopersicum
  source 1..101: mol_type = unassigned DNA
ttgatctttaaccctgcaaccgaagctattgactgtgaaaacttcaccaacaagcatttgatcaatgacctcctccctcttcgacccagtcaacttgtgca

SEQ ID NO: 687 - DNA, 101 bp, Solanum lycopersicum
  source 1..101: mol_type = unassigned DNA
ttgatctttaaccctgcaaccgaagctattgactgtgaaaacttcaccaagaagcatttgatcaatgacctcctccctcttcgacccagtcaacttgtgca

SEQ ID NO: 688 - DNA, 101 bp, Solanum lycopersicum
  source 1..101: mol_type = unassigned DNA
cctgaagaagctgtttcgactgatactattaatggtggggggcagaacccagttttcgatcagagtcttcgacttaatgtcaagactattgaaacatcagt

SEQ ID NO: 689 - DNA, 101 bp, Solanum lycopersicum
  source 1..101: mol_type = unassigned DNA
cctgaagaagctgtttcgactgatactattaatggtggggggcagaacccggttttcgatcagagtcttcgacttaatgtcaagactattgaaacatcagt

SEQ ID NO: 690 - DNA, 101 bp, Solanum lycopersicum
  source 1..101: mol_type = unassigned DNA
cactccgaaactttgtcagaacagggaagtgtcaaatcaattgggactactccggtaacccaactgcccaggctgcacaagaatgtcagcgactcaatgtt

SEQ ID NO: 691 - DNA, 101 bp, Solanum lycopersicum
  source 1..101: mol_type = unassigned DNA
cactccgaaactttgtcagaacagggaagtgtcaaatcaattgggactaccccggtaacccaactgcccaggctgcacaagaatgtcagcgactcaatgtt

SEQ ID NO: 692 - DNA, 101 bp, Solanum lycopersicum
  source 1..101: mol_type = unassigned DNA
tcaggctggattcttggtttattcgaagcggttagtcacagtaagataagttttgttgtataagcggtgggtaaagcggttgtcggtttgctgaacatgcc

SEQ ID NO: 693 - DNA, 101 bp, Solanum lycopersicum
  source 1..101: mol_type = unassigned DNA
tcaggctggattcttggtttattcgaagcggttagtcacagtaagataagctttgttgtataagcggtgggtaaagcggttgtcggtttgctgaacatgcc

SEQ ID NO: 694 - DNA, 101 bp, Solanum lycopersicum
  source 1..101: mol_type = unassigned DNA
caactttaagtcgaggatgaagggtggtggtgatttggctgttgcatctattacgaatggaaaagatagatatgttccgtttgatgtggagaacggttcta

SEQ ID NO: 695 - DNA, 101 bp, Solanum lycopersicum
  source 1..101: mol_type = unassigned DNA
caactttaagtcgaggatgaagggtggtggtgatttggctgttgcatctactacgaatggaaaagatagatatgttccgtttgatgtggagaacggttcta

SEQ ID NO: 696 - DNA, 101 bp, Solanum lycopersicum
  source 1..101: mol_type = unassigned DNA
gtgaggctactgtcgggttacccggtgggtgtgacattggggcccgacccattgatttttacattcatggtctacgtgctcttggtgctacggttgagttg

SEQ ID NO: 697 - DNA, 101 bp, Solanum lycopersicum
  source 1..101: mol_type = unassigned DNA
gtgaggctactgtcgggttacccggtgggtgtgacattggggcccgacccgttgatttttacattcatggtctacgtgctcttggtgctacggttgagttg

SEQ ID NO: 698 - DNA, 101 bp, Solanum lycopersicum
  source 1..101: mol_type = unassigned DNA
cagacgacaatactgttggaccaacttgcattttcgggatcacctttgtctggcaagcaaccttttctgaaacttgcttaggtgattttcttcttccctgt

SEQ ID NO: 699 - DNA, 101 bp, Solanum lycopersicum
  source 1..101: mol_type = unassigned DNA
cagacgacaatactgttggaccaacttgcattttcgggatcacctttgtccggcaagcaaccttttctgaaacttgcttaggtgattttcttcttccctgt

SEQ ID NO: 700 - DNA, 101 bp, Solanum lycopersicum
  source 1..101: mol_type = unassigned DNA
caaaaagttttcaaaccgtgtgatttctggtgaacctgatccagatcgtcatgtagttgcaccaatcaagtcagacaaaaagttttcatacccagatcttc

SEQ ID NO: 701 - DNA, 101 bp, Solanum lycopersicum
  source 1..101: mol_type = unassigned DNA
caaaaagttttcaaaccgtgtgatttctggtgaacctgatccagatcgtcctgtagttgcaccaatcaagtcagacaaaaagttttcatacccagatcttc

SEQ ID NO: 702 - DNA, 101 bp, Solanum lycopersicum
  source 1..101: mol_type = unassigned DNA
cggtggcggcaacagcggaggagaatcggcgtggtagggagggtttgaagattgggtttaccgttttgagtgatgaaggttttggaattcgcggaagcaga

SEQ ID NO: 703 - DNA, 101 bp, Solanum lycopersicum
  source 1..101: mol_type = unassigned DNA
cggtggcggcaacagcggaggagaatcggcgtggtagggagggtttgaaggttgggtttaccgttttgagtgatgaaggttttggaattcgcggaagcaga

SEQ ID NO: 704 - DNA, 101 bp, Solanum lycopersicum
  source 1..101: mol_type = unassigned DNA
gagttttttttgcggagttgaacgaagtgcttacaagagagttggcggagaatggttactcgggagttgaagttagggttactcccgtgcgaactgaaatc

SEQ ID NO: 705 - DNA, 101 bp, Solanum lycopersicum
  source 1..101: mol_type = unassigned DNA
gagttttttttgcggagttgaacgaagtgcttacaagagagttggcggaggatggttactcgggagttgaagttagggttactcccgtgcgaactgaaatc

SEQ ID NO: 706 - DNA, 101 bp, Solanum lycopersicum
  source 1..101: mol_type = unassigned DNA
aacaaaacttgaagagcaatttaaggaagtgaagttggaagaaagagcagtccgtagggaagccagaaggaagatgtatggttggtcaccaaaatcagagg

SEQ ID NO: 707 - DNA, 101 bp, Solanum lycopersicum
  source 1..101: mol_type = unassigned DNA
aacaaaacttgaagagcaatttaaggaagtgaagttggaagaaagagcagcccgtagggaagccagaaggaagatgtatggttggtcaccaaaatcagagg

SEQ ID NO: 708 - DNA, 101 bp, Solanum lycopersicum
  source 1..101: mol_type = unassigned DNA
caggaccaagtctccgatctttctggattaaacgggaaactgcatccataacctcattactaatgtcaagaggcttagatgcagcccgaacacttgggata

SEQ ID NO: 709 - DNA, 101 bp, Solanum lycopersicum
  source 1..101: mol_type = unassigned DNA
caggaccaagtctccgatctttctggattaaacgggaaactgcatccatagcctcattactaatgtcaagaggcttagatgcagcccgaacacttgggata

SEQ ID NO: 710 - DNA, 101 bp, Solanum lycopersicum
  source 1..101: mol_type = unassigned DNA
tctgtcatgcgttaatcgtgttaacatttcctttaaggtatgacgatgagttctggcatccgatttacatgcccggactgttttttgatggcaaagtttct

SEQ ID NO: 711 - DNA, 101 bp, Solanum lycopersicum
  source 1..101: mol_type = unassigned DNA
tctgtcatgcgttaatcgtgttaacatttcctttaaggtatgacgatgagctctggcatccgatttacatgcccggactgttttttgatggcaaagtttct

SEQ ID NO: 712 - DNA, 101 bp, Solanum lycopersicum
  source 1..101: mol_type = unassigned DNA
catattagtaaaggcctaatggaagggacacgataaacttgctcctcaattagctcgttgcctgttgtggttccaagttggtccctggttgtctcagtctc

SEQ ID NO: 713 - DNA, 101 bp, Solanum lycopersicum
  source 1..101: mol_type = unassigned DNA
catattagtaaaggcctaatggaagggacacgataaacttgctcctcaatcagctcgttgcctgttgtggttccaagttggtccctggttgtctcagtctc

SEQ ID NO: 714 - DNA, 101 bp, Solanum lycopersicum
  source 1..101: mol_type = unassigned DNA
ttaataggtgctactccgaggttcttcggtaggtattgcttgctagaggataaactcgaacggattaaaatttattgctacaggcgctgtgcgtctatgtt

SEQ ID NO: 715 - DNA, 101 bp, Solanum lycopersicum
  source 1..101: mol_type = unassigned DNA
ttaataggtgctactccgaggttcttcggtaggtattgcttgctagaggacaaactcgaacggattaaaatttattgctacaggcgctgtgcgtctatgtt

SEQ ID NO: 716 - DNA, 101 bp, Solanum lycopersicum
  source 1..101: mol_type = unassigned DNA
ccatccgctaaatccaaaaatttcgttgaatattaggttacctgcaaaaaagcaaaaggcaacccatctgaatcccttcgcggaactttctatatttggta

SEQ ID NO: 717 - DNA, 101 bp, Solanum lycopersicum
  source 1..101: mol_type = unassigned DNA
ccatccgctaaatccaaaaatttcgttgaatattaggttacctgcaaaaaggcaaaaggcaacccatctgaatcccttcgcggaactttctatatttggta

SEQ ID NO: 718 - DNA, 101 bp, Solanum lycopersicum
  source 1..101: mol_type = unassigned DNA
tcatcgactaattcaaattcacgctccttgcctcagtcacattaaggactaggccggtgtcgatccgcaaatcgattaaccaaagcaagtgcattactagt

SEQ ID NO: 719 - DNA, 101 bp, Solanum lycopersicum
  source 1..101: mol_type = unassigned DNA
tcatcgactaattcaaattcacgctccttgcctcagtcacattaaggacttggccggtgtcgatccgcaaatcgattaaccaaagcaagtgcattactagt

SEQ ID NO: 720 - DNA, 101 bp, Solanum lycopersicum
  source 1..101: mol_type = unassigned DNA
atcaacgccgccgacactgaatgaagctccgagtgtgattcgggtcgggttggaaacgacatttccggttcgagaaaatcacctaaaccaaaaacagtgaa

SEQ ID NO: 721 - DNA, 101 bp, Solanum lycopersicum
  source 1..101: mol_type = unassigned DNA
atcaacgccgccgacactgaatgaagctccgagtgtgattcgggtcgggtcggaaacgacatttccggttcgagaaaatcacctaaaccaaaaacagtgaa

SEQ ID NO: 722 - DNA, 101 bp, Solanum lycopersicum
  source 1..101: mol_type = unassigned DNA
gaacactatgaagatgagaccccagatgacaccgaagatgacgatgagggtggaaaagaagcatctcttgggcgttattgtgtcttctgtagtaaacttga

SEQ ID NO: 723 - DNA, 101 bp, Solanum lycopersicum
  source 1..101: mol_type = unassigned DNA
gaacactatgaagatgagaccccagatgacaccgaagatgacgatgaggggggaaaagaagcatctcttgggcgttattgtgtcttctgtagtaaacttga

SEQ ID NO: 724 - DNA, 101 bp, Solanum lycopersicum
  source 1..101: mol_type = unassigned DNA
actgcaagtaaaaatgtttcatatacggatgctgcagctgttgaagaaaaaaaatcctggtcttcttctgcatgcccatacaacctgtagaggacacgcaa

SEQ ID NO: 725 - DNA, 101 bp, Solanum lycopersicum
  source 1..101: mol_type = unassigned DNA
actgcaagtaaaaatgtttcatatacggatgctgcagctgttgaagaaaagaaatcctggtcttcttctgcatgcccatacaacctgtagaggacacgcaa

SEQ ID NO: 726 - DNA, 101 bp, Solanum lycopersicum
  source 1..101: mol_type = unassigned DNA
gttcagtatcccgaaattcaaaggtttgcttttcggctccttagtcagacatgcaatggtgcttcacattataggctgaaaaggagcttggtcgagacatt

SEQ ID NO: 727 - DNA, 101 bp, Solanum lycopersicum
  source 1..101: mol_type = unassigned DNA
gttcagtatcccgaaattcaaaggtttgcttttcggctccttagtcagacttgcaatggtgcttcacattataggctgaaaaggagcttggtcgagacatt

SEQ ID NO: 728 - DNA, 101 bp, Solanum lycopersicum
  source 1..101: mol_type = unassigned DNA
actatagcgtgcatgggaaacagaaaattgagtttgatccttgatgattgaaaatgaaggatcagcagaaccgtctttgctctgagaaacaacaaaaggtg

SEQ ID NO: 729 - DNA, 101 bp, Solanum lycopersicum
  source 1..101: mol_type = unassigned DNA
actatagcgtgcatgggaaacagaaaattgagtttgatccttgatgattggaaatgaaggatcagcagaaccgtctttgctctgagaaacaacaaaaggtg

SEQ ID NO: 730 - DNA, 101 bp, Solanum lycopersicum
  source 1..101: mol_type = unassigned DNA
taaccacagcatcagacaaagacataaagaggctgcgatgaggagaaaaaaatatggagtagacacactactcccaatattccacttcaaattattaaccc

SEQ ID NO: 731 - DNA, 101 bp, Solanum lycopersicum
  source 1..101: mol_type = unassigned DNA
taaccacagcatcagacaaagacataaagaggctgcgatgaggagaaaaacatatggagtagacacactactcccaatattccacttcaaattattaaccc

SEQ ID NO: 732 - DNA, 101 bp, Solanum lycopersicum
  source 1..101: mol_type = unassigned DNA
tggtgttctaacatttgaaagcaaattctgcaacctttccacactcattctagcacatgatgcgatgtcttctttggttggatgacgattgccttgtcgaa

SEQ ID NO: 733 - DNA, 101 bp, Solanum lycopersicum
  source 1..101: mol_type = unassigned DNA
tggtgttctaacatttgaaagcaaattctgcaacctttccacactcattccagcacatgatgcgatgtcttctttggttggatgacgattgccttgtcgaa

SEQ ID NO: 734 - DNA, 101 bp, Solanum lycopersicum
  source 1..101: mol_type = unassigned DNA
cgtttgcatgaccgtctgtggctgcattcgtagatgttgaatttgctttcagtaccaaacttttgtatgacagacgacataacttctgtcatatttccagg

SEQ ID NO: 735 - DNA, 101 bp, Solanum lycopersicum
  source 1..101: mol_type = unassigned DNA
cgtttgcatgaccgtctgtggctgcattcgtagatgttgaatttgctttcggtaccaaacttttgtatgacagacgacataacttctgtcatatttccagg

SEQ ID NO: 736 - DNA, 101 bp, Solanum lycopersicum
  source 1..101: mol_type = unassigned DNA
ccatcccagaagacataatttgtagcattggagcatgttccgatggacctagcattacaaaggaatgatgtttctagtgtaccagtcccgcagcaagcctt

SEQ ID NO: 737 - DNA, 101 bp, Solanum lycopersicum
  source 1..101: mol_type = unassigned DNA
ccatcccagaagacataatttgtagcattggagcatgttccgatggacctggcattacaaaggaatgatgtttctagtgtaccagtcccgcagcaagcctt

SEQ ID NO: 738 - DNA, 201 bp, Solanum lycopersicum
  unsure 75: note = a, c, t, g, unknown or other
  unsure 162: note = a, c, t, g, unknown or other
  source 1..201: mol_type = unassigned DNA
gaattcttgcatttgaaattgcaactttgatgtctaaggtggttaacttgtggcagtgtctaagtgaaaggcgantcgacaagttaagagaagaaatctcaagttcacttggcattcagaagcttgttgctgaagatgacaaatatcttatggatcttgctnttgctgagataattgacaatttgggatctctgacgaagt

SEQ ID NO: 739 - DNA, 201 bp, Solanum lycopersicum
  unsure 75: note = a, c, t, g, unknown or other
  unsure 162: note = a, c, t, g, unknown or other
  source 1..201: mol_type = unassigned DNA
gaattcttgcatttgaaattgcaactttgatgtctaaggtggttaacttgtggcagtgtctaagtgaaaggcgantcgacaagttaagagaagaaatctcgagttcacttggcattcagaagcttgttgctgaagatgacaaatatcttatggatcttgctnttgctgagataattgacaatttgggatctctgacgaagt

SEQ ID NO: 740 - DNA, 101 bp, Solanum lycopersicum
  source 1..101: mol_type = unassigned DNA
cccacaaaatagctggtagagaatcattgattggctcaatttagcctctataacacattttgcaagaactgaaagattgataagtaaccatcccatcatac

SEQ ID NO: 741 - DNA, 101 bp, Solanum lycopersicum
  source 1..101: mol_type = unassigned DNA
cccacaaaatagctggtagagaatcattgattggctcaatttagcctctacaacacattttgcaagaactgaaagattgataagtaaccatcccatcatac

SEQ ID NO: 742 - DNA, 101 bp, Solanum lycopersicum
  source 1..101: mol_type = unassigned DNA
aatgatgtcattgagatctttagtggatagtaaaatggtgggttcttaagtaaaatggtaaagaggtgcgctgttcgtgatgtgggcttgtagataaagct

SEQ ID NO: 743 - DNA, 101 bp, Solanum lycopersicum
  source 1..101: mol_type = unassigned DNA
aatgatgtcattgagatctttagtggatagtaaaatggtgggttcttaaggaaaatggtaaagaggtgcgctgttcgtgatgtgggcttgtagataaagct

SEQ ID NO: 744 - DNA, 101 bp, Solanum lycopersicum
  source 1..101: mol_type = unassigned DNA
caaaacccgcatgctggtgacgttttggttgattctatgaaaaggtattatggaaagttacctgcagtcgttgaactgtttagtcaagttggagcacaggt

SEQ ID NO: 745 - DNA, 101 bp, Solanum lycopersicum
  source 1..101: mol_type = unassigned DNA
caaaacccgcatgctggtgacgttttggttgattctatgaaaaggtattacggaaagttacctgcagtcgttgaactgtttagtcaagttggagcacaggt

SEQ ID NO: 746 - DNA, 101 bp, Solanum lycopersicum
  source 1..101: mol_type = unassigned DNA
acactcatgaacattgctgataacccgacgaatgtccaactccccggtatatacaacaagcaagagaatgccagggtacctattattgtcactggtaacga

SEQ ID NO: 747 - DNA, 101 bp, Solanum lycopersicum
  source 1..101: mol_type = unassigned DNA
acactcatgaacattgctgataacccgacgaatgtccaactccccggtatgtacaacaagcaagagaatgccagggtacctattattgtcactggtaacga

SEQ ID NO: 748 - DNA, 101 bp, Solanum lycopersicum
  source 1..101: mol_type = unassigned DNA
ttaatgcatcacagacaggatgtaaaccacaccctacgcgtatagatattatcagcccattatccaatttgttgaagcgtttgcaagttagggatacagag

SEQ ID NO: 749 - DNA, 101 bp, Solanum lycopersicum
  source 1..101: mol_type = unassigned DNA
ttaatgcatcacagacaggatgtaaaccacaccctacgcgtatagatattctcagcccattatccaatttgttgaagcgtttgcaagttagggatacagag

SEQ ID NO: 750 - DNA, 101 bp, Solanum lycopersicum
  source 1..101: mol_type = unassigned DNA
tcttttggtagaagagatgtgccatctttccaattttcatcaatatattcaagaatcactagagactcaggaattggatttcccttgtgcaaaaatacagg

SEQ ID NO: 751 - DNA, 101 bp, Solanum lycopersicum
  source 1..101: mol_type = unassigned DNA
tcttttggtagaagagatgtgccatctttccaattttcatcaatatattccagaatcactagagactcaggaattggatttcccttgtgcaaaaatacagg

SEQ ID NO: 752 - DNA, 101 bp, Solanum lycopersicum
  source 1..101: mol_type = unassigned DNA
gagtagaagaagaatcaaaaagcaaaaatggtgaaagacagaaccattggtgtggctgtagatttttcaaagagcagcaaaacagctttgaaatgggcaat

SEQ ID NO: 753 - DNA, 101 bp, Solanum lycopersicum
  source 1..101: mol_type = unassigned DNA
gagtagaagaagaatcaaaaagcaaaaatggtgaaagacagaaccattggcgtggctgtagatttttcaaagagcagcaaaacagctttgaaatgggcaat

SEQ ID NO: 754 - DNA, 101 bp, Solanum lycopersicum
  source 1..101: mol_type = unassigned DNA
tcgctcatctacccttctccacttaaatagtttacgggcaagactcgtacagtgcatcccgcagtggggacacaagtatgtgtctttcatttggttcttaa

SEQ ID NO: 755 - DNA, 101 bp, Solanum lycopersicum
  source 1..101: mol_type = unassigned DNA
tcgctcatctacccttctccacttaaatagtttacgggcaagactcgtaccgtgcatcccgcagtggggacacaagtatgtgtctttcatttggttcttaa

SEQ ID NO: 756 - DNA, 101 bp, Solanum lycopersicum
  source 1..101: mol_type = unassigned DNA
tacagatcctctgttttcttcaaacaacaaatgtctcttattccaagcttttttggtggtcggaggagcaatatcttcgacccattttcccttgacttatg

SEQ ID NO: 757 - DNA, 101 bp, Solanum lycopersicum
  source 1..101: mol_type = unassigned DNA
tacagatcctctgttttcttcaaacaacaaatgtctcttattccaagcttctttggtggtcggaggagcaatatcttcgacccattttcccttgacttatg

SEQ ID NO: 758 - DNA, 101 bp, Solanum lycopersicum
  source 1..101: mol_type = unassigned DNA
tccaaatccataagtggttgttacttcacttgaacaccattccccttcttagctgaatttgtgttgcatcacctttttccgtagtgcatgctcctcttggt

SEQ ID NO: 759 - DNA, 101 bp, Solanum lycopersicum
  source 1..101: mol_type = unassigned DNA
tccaaatccataagtggttgttacttcacttgaacaccattccccttcttcgctgaatttgtgttgcatcacctttttccgtagtgcatgctcctcttggt

SEQ ID NO: 760 - DNA, 101 bp, Solanum lycopersicum
  source 1..101: mol_type = unassigned DNA
caggaagacataatcacaacacttttgaatctgtccatccatgacaacaataagaagcttgtcgcggagactccaaaagttattccacttcttgtggaggc

SEQ ID NO: 761 - DNA, 101 bp, Solanum lycopersicum
  source 1..101: mol_type = unassigned DNA
caggaagacataatcacaacacttttgaatctgtccatccatgacaacaacaagaagcttgtcgcggagactccaaaagttattccacttcttgtggaggc

SEQ ID NO: 762 - DNA, 101 bp, Solanum lycopersicum
  source 1..101: mol_type = unassigned DNA
gatggaattacacacaacctcagatgaatatgagagacagctacatacctaattggtctgcatcgcgtaatcctgggcattattctggctatcgtggtcct

SEQ ID NO: 763 - DNA, 101 bp, Solanum lycopersicum
  source 1..101: mol_type = unassigned DNA
gatggaattacacacaacctcagatgaatatgagagacagctacatacctgattggtctgcatcgcgtaatcctgggcattattctggctatcgtggtcct

SEQ ID NO: 764 - DNA, 101 bp, Solanum lycopersicum
  source 1..101: mol_type = unassigned DNA
ccagcataaatttaagaatggagtagaatccaattgacaaaagagagcagttattaacgcacctaaacatccttacccgcactgcaattaatgcatttatc

SEQ ID NO: 765 - DNA, 101 bp, Solanum lycopersicum
  source 1..101: mol_type = unassigned DNA
ccagcataaatttaagaatggagtagaatccaattgacaaaagagagcagctattaacgcacctaaacatccttacccgcactgcaattaatgcatttatc

SEQ ID NO: 766 - DNA, 101 bp, Solanum lycopersicum
  source 1..101: mol_type = unassigned DNA
actgctggacctggcattgacatgtccatggcacataatcatgctatttttcagagtctcccggaagctacgaggcaaaatttacagatggccgcagcagc

SEQ ID NO: 767 - DNA, 101 bp, Solanum lycopersicum
  source 1..101: mol_type = unassigned DNA
actgctggacctggcattgacatgtccatggcacataatcatgctattttccagagtctcccggaagctacgaggcaaaatttacagatggccgcagcagc

SEQ ID NO: 768 - DNA, 101 bp, Solanum lycopersicum
  source 1..101: mol_type = unassigned DNA
gatttattcacagataacgaagaggatgatatggaaaatgctgatatcagtatcaagggaaggaggagagaagacgatggcatctttttacgactcaggat

SEQ ID NO: 769 - DNA, 101 bp, Solanum lycopersicum
  source 1..101: mol_type = unassigned DNA
gatttattcacagataacgaagaggatgatatggaaaatgctgatatcagcatcaagggaaggaggagagaagacgatggcatctttttacgactcaggat

SEQ ID NO: 770 - DNA, 101 bp, Solanum lycopersicum
  source 1..101: mol_type = unassigned DNA
aaatcggcagagaaggaagtcgagatattgaccaaatttgctccactcaaaggattctccatctaattgaactttctgttgtacagtttagttcagtatct

SEQ ID NO: 771 - DNA, 101 bp, Solanum lycopersicum
  source 1..101: mol_type = unassigned DNA
aaatcggcagagaaggaagtcgagatattgaccaaatttgctccactcaagggattctccatctaattgaactttctgttgtacagtttagttcagtatct

SEQ ID NO: 772 - DNA, 101 bp, Solanum lycopersicum
  source 1..101: mol_type = unassigned DNA
agttcaagcaaggtgacatactaatcaacacgttcgtgcaatcgttgctcaattgagcaacaactccagaacagatcatcgcaaacataatcgcgaaaaaa

SEQ ID NO: 773 - DNA, 101 bp, Solanum lycopersicum
  source 1..101: mol_type = unassigned DNA
agttcaagcaaggtgacatactaatcaacacgttcgtgcaatcgttgctcgattgagcaacaactccagaacagatcatcgcaaacataatcgcgaaaaaa

SEQ ID NO: 774 - DNA, 101 bp, Solanum lycopersicum
  source 1..101: mol_type = unassigned DNA
caatacagatatgggagaaaactaaagatctgaaggcacaagtggagacgtactataaatccttaaaattcactccatcgcaattccccactgttggtgga

SEQ ID NO: 775 - DNA, 101 bp, Solanum lycopersicum
  source 1..101: mol_type = unassigned DNA
caatacagatatgggagaaaactaaagatctgaaggcacaagtggagacgcactataaatccttaaaattcactccatcgcaattccccactgttggtgga

SEQ ID NO: 776 - DNA, 101 bp, Solanum lycopersicum
  source 1..101: mol_type = unassigned DNA
gatgaaaagattgcaactcattttcaagttgccgtcagctcaattgcacaatctctcagaactcagattattaataggtcttatgatgaagtttctatatg

SEQ ID NO: 777 - DNA, 101 bp, Solanum lycopersicum
  source 1..101: mol_type = unassigned DNA
gatgaaaagattgcaactcattttcaagttgccgtcagctcaattgcacagtctctcagaactcagattattaataggtcttatgatgaagtttctatatg

SEQ ID NO: 778 - DNA, 101 bp, Solanum lycopersicum
  source 1..101: mol_type = unassigned DNA
acaagttcttctttgaaacggagatattcaggaaccgtcaattgttcaacactcagatcatatacgttcacacgaacatattcccaaacacctggccttgg

SEQ ID NO: 779 - DNA, 101 bp, Solanum lycopersicum
  source 1..101: mol_type = unassigned DNA
acaagttcttctttgaaacggagatattcaggaaccgtcaattgttcaacgctcagatcatatacgttcacacgaacatattcccaaacacctggccttgg

SEQ ID NO: 780 - DNA, 101 bp, Solanum lycopersicum
  source 1..101: mol_type = unassigned DNA
gctcgagtcctcaaatgaggaatcagctgattcgaggggtctcccttcaatccacgttctaacagacttgttcttcagttggtaggtgtagtacacttctt

SEQ ID NO: 781 - DNA, 101 bp, Solanum lycopersicum
  source 1..101: mol_type = unassigned DNA
gctcgagtcctcaaatgaggaatcagctgattcgaggggtctcccttcaacccacgttctaacagacttgttcttcagttggtaggtgtagtacacttctt

SEQ ID NO: 782 - DNA, 101 bp, Solanum lycopersicum
  source 1..101: mol_type = unassigned DNA
gagtcaagatgagattgcaaaaaaggactcttcaaccaggaagagaccgctttttgtcaatcctcaaaggccaatgagaccaagtactattgctgcagcta

SEQ ID NO: 783 - DNA, 101 bp, Solanum lycopersicum
  source 1..101: mol_type = unassigned DNA
gagtcaagatgagattgcaaaaaaggactcttcaaccaggaagagaccgccttttgtcaatcctcaaaggccaatgagaccaagtactattgctgcagcta

SEQ ID NO: 784 - DNA, 101 bp, Solanum lycopersicum
  source 1..101: mol_type = unassigned DNA
tggagatgtactctagatcttaactgtgatgttctgagctgtaaaagtactaactccgatcatcagtcagatcaacgtccctattactttgtaacgatgtc

SEQ ID NO: 785 - DNA, 101 bp, Solanum lycopersicum
  source 1..101: mol_type = unassigned DNA
tggagatgtactctagatcttaactgtgatgttctgagctgtaaaagtaccaactccgatcatcagtcagatcaacgtccctattactttgtaacgatgtc

SEQ ID NO: 786 - DNA, 101 bp, Solanum lycopersicum
  source 1..101: mol_type = unassigned DNA
tgaagattgtgtatggtgatactaaagtggatttaaaaggcgaaaacgacataaacatgggtgcaggggaagttgttggttttgttctggagaataggaag

SEQ ID NO: 787 - DNA, 101 bp, Solanum lycopersicum
  source 1..101: mol_type = unassigned DNA
tgaagattgtgtatggtgatactaaagtggatttaaaaggcgaaaacgacgtaaacatgggtgcaggggaagttgttggttttgttctggagaataggaag

SEQ ID NO: 788 - DNA, 101 bp, Solanum lycopersicum
  source 1..101: mol_type = unassigned DNA
ggatatgaaaggtaagaagttaaccgtcattggtacagttgatccagtgaacgtagtgagtaggctacgtaagttttggtggacagagatactcatagtag

SEQ ID NO: 789 - DNA, 101 bp, Solanum lycopersicum
  source 1..101: mol_type = unassigned DNA
ggatatgaaaggtaagaagttaaccgtcattggtacagttgatccagtgagcgtagtgagtaggctacgtaagttttggtggacagagatactcatagtag

SEQ ID NO: 790 - DNA, 101 bp, Solanum lycopersicum
  source 1..101: mol_type = unassigned DNA
aaagagtaaaccggtgcacaaagtatcctacgtcaacaagcttcggggaaagccgcaccccaagaagcataagtagattcataaccacaaagtgatactat

SEQ ID NO: 791 - DNA, 101 bp, Solanum lycopersicum
  source 1..101: mol_type = unassigned DNA
aaagagtaaaccggtgcacaaagtatcctacgtcaacaagcttcggggaaggccgcaccccaagaagcataagtagattcataaccacaaagtgatactat

SEQ ID NO: 792 - DNA, 101 bp, Solanum lycopersicum
  source 1..101: mol_type = unassigned DNA
ctttagctgtcttgatcttctgaagtctcacttacagtgcgtcaacttcactcagctctagactgcccagctcgggaagacaagataatgccaacaataag

SEQ ID NO: 793 - DNA, 101 bp, Solanum lycopersicum
  source 1..101: mol_type = unassigned DNA
ctttagctgtcttgatcttctgaagtctcacttacagtgcgtcaacttcagtcagctctagactgcccagctcgggaagacaagataatgccaacaataag

SEQ ID NO: 794 - DNA, 101 bp, Solanum lycopersicum
  source 1..101: mol_type = unassigned DNA
ccataagagaacaacagattggtggcattgttcaggtgattgattgatttattcctggatgttttaaacaacttatcatgtcgatttcttgtggattactc

SEQ ID NO: 795 - DNA, 101 bp, Solanum lycopersicum
  source 1..101: mol_type = unassigned DNA
ccataagagaacaacagattggtggcattgttcaggtgattgattgatttgttcctggatgttttaaacaacttatcatgtcgatttcttgtggattactc

SEQ ID NO: 796 - DNA, 154 bp, Solanum lycopersicum
  source 1..154: mol_type = unassigned DNA
aaacccttatcggcgcaagaatgggaaaatctaatcgacgattacaaccacggtggttcacggcggctccggtggacttccatcaactacgccgccgttcctcttcttgacctcacactttcatcacttctccggaaagatatccctcacaatc

SEQ ID NO: 797 - DNA, 154 bp, Solanum lycopersicum
  source 1..154: mol_type = unassigned DNA
aaacccttatcggcgcaagaatgggaaaatctaatcgacgattacaaccacggcggttcacggcggctccggtggacttccatcaactacgccgccgttcctcttcttgacctcacactttcatcacttctccggaaagatatccctcacaatc

SEQ ID NO: 798 - DNA, 101 bp, Solanum lycopersicum
  source 1..101: mol_type = unassigned DNA
gaaagggggattttggtaagagattgggcacctcaattggagatcttgtcacattgttcgactggtggattcttgagtcactgtgggtggaattcatgcat

SEQ ID NO: 799 - DNA, 101 bp, Solanum lycopersicum
  source 1..101: mol_type = unassigned DNA
gaaagggggattttggtaagagattgggcacctcaattggagatcttgtcgcattgttcgactggtggattcttgagtcactgtgggtggaattcatgcat

SEQ ID NO: 800 - DNA, 101 bp, Solanum lycopersicum
  source 1..101: mol_type = unassigned DNA
taaccaaccactttggtatctgttagtccaccaacatgactatgagtaattcgactattgaaactgaagatacttttgccagcttgcttgaacttgctgcc

SEQ ID NO: 801 - DNA, 101 bp, Solanum lycopersicum
  source 1..101: mol_type = unassigned DNA
taaccaaccactttggtatctgttagtccaccaacatgactatgagtaatccgactattgaaactgaagatacttttgccagcttgcttgaacttgctgcc

SEQ ID NO: 802 - DNA, 101 bp, Solanum lycopersicum
  source 1..101: mol_type = unassigned DNA
ccacgttggactaacgaaattttaaccatcatagaaatgacttccgcgcgttccttcactggaattcaatttcttatagtgggacccactttccgatctgt

SEQ ID NO: 803 - DNA, 101 bp, Solanum lycopersicum
  source 1..101: mol_type = unassigned DNA
ccacgttggactaacgaaattttaaccatcatagaaatgacttccgcgcgctccttcactggaattcaatttcttatagtgggacccactttccgatctgt

SEQ ID NO: 804 - DNA, 101 bp, Solanum lycopersicum
  source 1..101: mol_type = unassigned DNA
tttgctgaagagagcaggatttttatgtggcagttgctagactgcagtataaactccttttgcagtttctttcgttacatttatgttgccgtctttatcat

SEQ ID NO: 805 - DNA, 101 bp, Solanum lycopersicum
  source 1..101: mol_type = unassigned DNA
tttgctgaagagagcaggatttttatgtggcagttgctagactgcagtatgaactccttttgcagtttctttcgttacatttatgttgccgtctttatcat

SEQ ID NO: 806 - DNA, 101 bp, Solanum lycopersicum
  source 1..101: mol_type = unassigned DNA
aagggaagagaatgtgctttgctagtagtttgaaggagtcttttttggtgttttgagggtttgattctttttgtaatgggctgtgaataaagtgaagtgct

SEQ ID NO: 807 - DNA, 101 bp, Solanum lycopersicum
  source 1..101: mol_type = unassigned DNA
aagggaagagaatgtgctttgctagtagtttgaaggagtcttttttggtgctttgagggtttgattctttttgtaatgggctgtgaataaagtgaagtgct

SEQ ID NO: 808 - DNA, 201 bp, Solanum lycopersicum
  unsure 185: note = a, c, t, g, unknown or other
  unsure 199: note = a, c, t, g, unknown or other
  source 1..201: mol_type = unassigned DNA
ttttgagttaaattcgaataatttcaaagtttacacaataattttgatgttggtggttgttcaggttcaatgtaacaatgaggtaattcaacagcattgtaacggacctgtacaaaaattaaagcgatttcttataaagaaattgaaacgtaatgtttctgttgttcgacaaaagaaaggtaatnaatcatgcagccgnta

SEQ ID NO: 809 - DNA, 201 bp, Solanum lycopersicum
  unsure 185: note = a, c, t, g, unknown or other
  unsure 199: note = a, c, t, g, unknown or other
  source 1..201: mol_type = unassigned DNA
ttttgagttaaattcgaataatttcaaagtttacacaataattttgatgttggtggttgttcaggttcaatgtaacaatgaggtaattcaacagcattgtgacggacctgtacaaaaattaaagcgatttcttataaagaaattgaaacgtaatgtttctgttgttcgacaaaagaaaggtaatnaatcatgcagccgnta

SEQ ID NO: 810 - DNA, 101 bp, Solanum lycopersicum
  source 1..101: mol_type = unassigned DNA
tcaccatataaccacgaaataccttctggatccttaacgctgaagcagatcttctatcaggcgcctccgcctgcgccaactcatcaggtttctgtgaccga

SEQ ID NO: 811 - DNA, 101 bp, Solanum lycopersicum
  source 1..101: mol_type = unassigned DNA
tcaccatataaccacgaaataccttctggatccttaacgctgaagcagatgttctatcaggcgcctccgcctgcgccaactcatcaggtttctgtgaccga

SEQ ID NO: 812 - DNA, 101 bp, Solanum lycopersicum
  source 1..101: mol_type = unassigned DNA
ccagcttgaaaagcagagacattaacgtttcattcacccgtaccctttccatttcgtctctccgaatcaactccgccgtttcgccgaataaaagcttccgt

SEQ ID NO: 813 - DNA, 101 bp, Solanum lycopersicum
  source 1..101: mol_type = unassigned DNA
ccagcttgaaaagcagagacattaacgtttcattcacccgtaccctttccctttcgtctctccgaatcaactccgccgtttcgccgaataaaagcttccgt

SEQ ID NO: 814 - DNA, 101 bp, Solanum lycopersicum
  source 1..101: mol_type = unassigned DNA
gttgcgctctatgtattttactgtctatatacaccattcactgctgcttcaacgtggactgcgttaccatcttccatgatcatcccgttgatttgtgttct

SEQ ID NO: 815 - DNA, 101 bp, Solanum lycopersicum
  source 1..101: mol_type = unassigned DNA
gttgcgctctatgtattttactgtctatatacaccattcactgctgcttcgacgtggactgcgttaccatcttccatgatcatcccgttgatttgtgttct

SEQ ID NO: 816 - DNA, 101 bp, Solanum lycopersicum
  source 1..101: mol_type = unassigned DNA
atttgagctgtgaaaggagttgcagatttgggatagttagggcttcttgtaccgaggaggtggtggtggatgatcatgagattgatgacgtggagaggaag

SEQ ID NO: 817 - DNA, 101 bp, Solanum lycopersicum
  source 1..101: mol_type = unassigned DNA
atttgagctgtgaaaggagttgcagatttgggatagttagggcttcttgtgccgaggaggtggtggtggatgatcatgagattgatgacgtggagaggaag

SEQ ID NO: 818 - DNA, 101 bp, Solanum lycopersicum
  source 1..101: mol_type = unassigned DNA
cctctctgcatcatacagttgatcgtgggggaacacacatatttctagtttcagtaatattccttttgtatcttgcatgcagtcattcagaaagagatagg

SEQ ID NO: 819 - DNA, 101 bp, Solanum lycopersicum
  source 1..101: mol_type = unassigned DNA
cctctctgcatcatacagttgatcgtgggggaacacacatatttctagttccagtaatattccttttgtatcttgcatgcagtcattcagaaagagatagg

SEQ ID NO: 820 - DNA, 101 bp, Solanum lycopersicum
  source 1..101: mol_type = unassigned DNA
gtcgatcgaacgttattgataacgagaacaacgatcttttctcatgtgcatgcaaatcaggccttgatatacgagatgtgtctatttacgatggttttcct

SEQ ID NO: 821 - DNA, 101 bp, Solanum lycopersicum
  source 1..101: mol_type = unassigned DNA
gtcgatcgaacgttattgataacgagaacaacgatcttttctcatgtgcacgcaaatcaggccttgatatacgagatgtgtctatttacgatggttttcct

SEQ ID NO: 822 - DNA, 101 bp, Solanum lycopersicum
  source 1..101: mol_type = unassigned DNA
acttaatccaagaaagagaggaaattgtggcttgtggaatttcaaatcaataataaccccaaaaagaactgctaaaaaccgtaagcaagataccacagaga

SEQ ID NO: 823 - DNA, 101 bp, Solanum lycopersicum
  source 1..101: mol_type = unassigned DNA
acttaatccaagaaagagaggaaattgtggcttgtggaatttcaaatcaacaataaccccaaaaagaactgctaaaaaccgtaagcaagataccacagaga

SEQ ID NO: 824 - DNA, 101 bp, Solanum lycopersicum
  source 1..101: mol_type = unassigned DNA
gtggagctcaatttggggcttatttacagaggagcacagatactcctgcaaatgggagttgcggtagaattgaagccaccggagaaaacccagtttgggaa

SEQ ID NO: 825 - DNA, 101 bp, Solanum lycopersicum
  source 1..101: mol_type = unassigned DNA
gtggagctcaatttggggcttatttacagaggagcacagatactcctgcacatgggagttgcggtagaattgaagccaccggagaaaacccagtttgggaa

SEQ ID NO: 826 - DNA, 101 bp, Solanum lycopersicum
  source 1..101: mol_type = unassigned DNA
tccttgtcttgaatcttagctttgacattatcaatggtgtcagaactctcaacctcaagagtgatggtctttccggtgagtgtcttaacaaatatctgcat

SEQ ID NO: 827 - DNA, 101 bp, Solanum lycopersicum
  source 1..101: mol_type = unassigned DNA
tccttgtcttgaatcttagctttgacattatcaatggtgtcagaactctcgacctcaagagtgatggtctttccggtgagtgtcttaacaaatatctgcat

SEQ ID NO: 828 - DNA, 101 bp, Solanum lycopersicum
  source 1..101: mol_type = unassigned DNA
atatctttgttttgcaaaactcatgaatttaagcttgttcaagcaaacgatggaagacggaggtcgtgaaattagagtccctgtggcatcaagcttctcca

SEQ ID NO: 829 - DNA, 101 bp, Solanum lycopersicum
  source 1..101: mol_type = unassigned DNA
atatctttgttttgcaaaactcatgaatttaagcttgttcaagcaaacgacggaagacggaggtcgtgaaattagagtccctgtggcatcaagcttctcca

SEQ ID NO: 830 - DNA, 101 bp, Solanum lycopersicum
  source 1..101: mol_type = unassigned DNA
ttgaagtttgtggattttgtcagtaggatggtacttgttaggacccgaaatgccaagcaactcgcgtctcatgatcataagagcaatatcgtcaattataa

SEQ ID NO: 831 - DNA, 101 bp, Solanum lycopersicum
  source 1..101: mol_type = unassigned DNA
ttgaagtttgtggattttgtcagtaggatggtacttgttaggacccgaaacgccaagcaactcgcgtctcatgatcataagagcaatatcgtcaattataa

SEQ ID NO: 832 - DNA, 101 bp, Solanum lycopersicum
  source 1..101: mol_type = unassigned DNA
tagtttgattgtttgatcaagcagcaagaacaagtgcttttattgtcccttgactgtttgctgtaacaatggttgggctgtcacgtttccaacaaacagca

SEQ ID NO: 833 - DNA, 101 bp, Solanum lycopersicum
  source 1..101: mol_type = unassigned DNA
tagtttgattgtttgatcaagcagcaagaacaagtgcttttattgtccctcgactgtttgctgtaacaatggttgggctgtcacgtttccaacaaacagca

SEQ ID NO: 834 - DNA, 101 bp, Solanum lycopersicum
  source 1..101: mol_type = unassigned DNA
atagagcaaagaaccctgaccattctaagcagcaaccacctcttgagcacatctagactccaaccatgatgtagctgcaaccttcgtggtcaaaaaccacc

SEQ ID NO: 835 - DNA, 101 bp, Solanum lycopersicum
  source 1..101: mol_type = unassigned DNA
atagagcaaagaaccctgaccattctaagcagcaaccacctcttgagcacgtctagactccaaccatgatgtagctgcaaccttcgtggtcaaaaaccacc

SEQ ID NO: 836 - DNA, 101 bp, Solanum lycopersicum
  source 1..101: mol_type = unassigned DNA
gcaacctcaacttctaattgtttctctgtgtcacggactgaagtagttggtgatgagtcaaattgctcgtccacatcttggacaactgacacatctgggat

SEQ ID NO: 837 - DNA, 101 bp, Solanum lycopersicum
  source 1..101: mol_type = unassigned DNA
gcaacctcaacttctaattgtttctctgtgtcacggactgaagtagttggcgatgagtcaaattgctcgtccacatcttggacaactgacacatctgggat

SEQ ID NO: 838 - DNA, 101 bp, Solanum lycopersicum
  source 1..101: mol_type = unassigned DNA
tcaaatgaggagcaaaaattgggtttaaacaccaaaaaaatgcagcagcaacagcagccttaaaaggccgaaactgaagagcaaaaaatgggtttaaactc

SEQ ID NO: 839 - DNA, 101 bp, Solanum lycopersicum
  source 1..101: mol_type = unassigned DNA
tcaaatgaggagcaaaaattgggtttaaacaccaaaaaaatgcagcagcagcagcagccttaaaaggccgaaactgaagagcaaaaaatgggtttaaactc

SEQ ID NO: 840 - DNA, 101 bp, Solanum lycopersicum
  source 1..101: mol_type = unassigned DNA
cccattaccaacacagtggcatcagcatgccttgcagccacttctgctaatccaaagttttgattccctggacaagctactcccatacatccttgttggtg

SEQ ID NO: 841 - DNA, 101 bp, Solanum lycopersicum
  source 1..101: mol_type = unassigned DNA
cccattaccaacacagtggcatcagcatgccttgcagccacttctgctaacccaaagttttgattccctggacaagctactcccatacatccttgttggtg

SEQ ID NO: 842 - DNA, 101 bp, Solanum lycopersicum
  source 1..101: mol_type = unassigned DNA
gctttaaagggtcctaaagatgtctctgatggcctaaggaaacttgataaactaatagagaaaagtgatggaccagaaaagttccagcttgctcgtggact

SEQ ID NO: 843 - DNA, 101 bp, Solanum lycopersicum
  source 1..101: mol_type = unassigned DNA
gctttaaagggtcctaaagatgtctctgatggcctaaggaaacttgataagctaatagagaaaagtgatggaccagaaaagttccagcttgctcgtggact

SEQ ID NO: 844 - DNA, 101 bp, Solanum lycopersicum
  source 1..101: mol_type = unassigned DNA
ttctcaagtcatcccactcattatagttatcattccacacatcatccaggacaacaagaaacttcttcccttcgggctttctttcaattgacctatagctt

SEQ ID NO: 845 - DNA, 101 bp, Solanum lycopersicum
  source 1..101: mol_type = unassigned DNA
ttctcaagtcatcccactcattatagttatcattccacacatcatccagggcaacaagaaacttcttcccttcgggctttctttcaattgacctatagctt

SEQ ID NO: 846 - DNA, 101 bp, Solanum lycopersicum
  source 1..101: mol_type = unassigned DNA
tattaggagacaggtgtgatttcacctctggaataattttcttgtgaaactgacgatcatcatgagattcaacaaaacgctgggtcatattggaggcttga

SEQ ID NO: 847 - DNA, 101 bp, Solanum lycopersicum
  source 1..101: mol_type = unassigned DNA
tattaggagacaggtgtgatttcacctctggaataattttcttgtgaaaccgacgatcatcatgagattcaacaaaacgctgggtcatattggaggcttga

SEQ ID NO: 848 - DNA, 101 bp, Solanum lycopersicum
  source 1..101: mol_type = unassigned DNA
gatatgttggaacaaagtcggcacatgtcctattacagaggagaagatggtcactttgagaaattgaaacaactctctgaatcagagcagctgaggacatt

SEQ ID NO: 849 - DNA, 101 bp, Solanum lycopersicum
  source 1..101: mol_type = unassigned DNA
gatatgttggaacaaagtcggcacatgtcctattacagaggagaagatggccactttgagaaattgaaacaactctctgaatcagagcagctgaggacatt

SEQ ID NO: 850 - DNA, 101 bp, Solanum lycopersicum
  source 1..101: mol_type = unassigned DNA
tgagtggatctttgtcgtgtgcatctgtatgtgtgtggtacatgcgtgcttttcttcatcaatttagatgacagtgagactactccaaagatcatgcatta

SEQ ID NO: 851 - DNA, 101 bp, Solanum lycopersicum
  source 1..101: mol_type = unassigned DNA
tgagtggatctttgtcgtgtgcatctgtatgtgtgtggtacatgcgtgctcttcttcatcaatttagatgacagtgagactactccaaagatcatgcatta

SEQ ID NO: 852 - DNA, 101 bp, Solanum lycopersicum
  source 1..101: mol_type = unassigned DNA
atactagagggaggtatatggcctattgtccaggtggccaacttccgctatataccagttaggtatcagctcctttacgtcaatttcttctgcttgcttga

SEQ ID NO: 853 - DNA, 101 bp, Solanum lycopersicum
  source 1..101: mol_type = unassigned DNA
atactagagggaggtatatggcctattgtccaggtggccaacttccgctacataccagttaggtatcagctcctttacgtcaatttcttctgcttgcttga

SEQ ID NO: 854 - DNA, 101 bp, Solanum lycopersicum
  source 1..101: mol_type = unassigned DNA
gggtctggggaggactttacccctaccttgggaggtagagagttgttttcaatagaacctcggctcaaaactaacttgaaaagatgcttggtattactgag

SEQ ID NO: 855 - DNA, 101 bp, Solanum lycopersicum
  source 1..101: mol_type = unassigned DNA
gggtctggggaggactttacccctaccttgggaggtagagagttgttttctatagaacctcggctcaaaactaacttgaaaagatgcttggtattactgag

SEQ ID NO: 856 - DNA, 101 bp, Solanum lycopersicum
  source 1..101: mol_type = unassigned DNA
gaaaactgaagtttgtcctccaagtttatgtgataacccaattatattattgctgtcctcatcttcttcatagtgttgcaaactgtgaccactcaaactat

SEQ ID NO: 857 - DNA, 101 bp, Solanum lycopersicum
  source 1..101: mol_type = unassigned DNA
gaaaactgaagtttgtcctccaagtttatgtgataacccaattatattatcgctgtcctcatcttcttcatagtgttgcaaactgtgaccactcaaactat

SEQ ID NO: 858 - DNA, 101 bp, Solanum lycopersicum
  source 1..101: mol_type = unassigned DNA
tccaggtcctcaaggcctttgcgaatactggaattgagcttatgattgggattccaaactcagacttgttggcgttttctcaattcgagtctaatgccaat

SEQ ID NO: 859 - DNA, 101 bp, Solanum lycopersicum
  source 1..101: mol_type = unassigned DNA
tccaggtcctcaaggcctttgcgaatactggaattgagcttatgattggggttccaaactcagacttgttggcgttttctcaattcgagtctaatgccaat

SEQ ID NO: 860 - DNA, 101 bp, Solanum lycopersicum
  source 1..101: mol_type = unassigned DNA
agaaagcatttcatatgggcaaagctacgtttgattttatatgttctgaaatagaatcagtagtgacaaaaaaggacacgatgttacgtatggcgatacct

SEQ ID NO: 861 - DNA, 101 bp, Solanum lycopersicum
  source 1..101: mol_type = unassigned DNA
agaaagcatttcatatgggcaaagctacgtttgattttatatgttctgaattagaatcagtagtgacaaaaaaggacacgatgttacgtatggcgatacct

SEQ ID NO: 862 - DNA, 101 bp, Solanum lycopersicum
  source 1..101: mol_type = unassigned DNA
atggcaagggtggttgtcgacccatatttcgtatttatggacaggatccattcatagtttctgatcggtctccgaaaagcttgttctcaacacaaaagaaa

SEQ ID NO: 863 - DNA, 101 bp, Solanum lycopersicum
  source 1..101: mol_type = unassigned DNA
atggcaagggtggttgtcgacccatatttcgtatttatggacaggatccactcatagtttctgatcggtctccgaaaagcttgttctcaacacaaaagaaa

SEQ ID NO: 864 - DNA, 101 bp, Solanum lycopersicum
  source 1..101: mol_type = unassigned DNA
tctctaattgaaaaaccttgtccacctccacctccacctccaccacttcctgagaagcatgtgaaggaagatttttctctaaccgaaaaactatgtccacc

SEQ ID NO: 865 - DNA, 101 bp, Solanum lycopersicum
  source 1..101: mol_type = unassigned DNA
tctctaattgaaaaaccttgtccacctccacctccacctccaccacttcccgagaagcatgtgaaggaagatttttctctaaccgaaaaactatgtccacc

SEQ ID NO: 866 - DNA, 101 bp, Solanum lycopersicum
  source 1..101: mol_type = unassigned DNA
gagcttcacgaagttatggcaagcaaaacgaagatttacttcgccatggaatacgttaaaggcggtgaattgttcgaaaaagtagctaaaggtaagcttag

SEQ ID NO: 867 - DNA, 101 bp, Solanum lycopersicum
  source 1..101: mol_type = unassigned DNA
gagcttcacgaagttatggcaagcaaaacgaagatttacttcgccatggagtacgttaaaggcggtgaattgttcgaaaaagtagctaaaggtaagcttag

SEQ ID NO: 868 - DNA, 101 bp, Solanum lycopersicum
  source 1..101: mol_type = unassigned DNA
tactatatctactactaatcttggtccttcattcacttgagatgtctttgtgtagacctccacttcctcgacttctgctgaataacgtctcgtgtatgaga

SEQ ID NO: 869 - DNA, 101 bp, Solanum lycopersicum
  source 1..101: mol_type = unassigned DNA
tactatatctactactaatcttggtccttcattcacttgagatgtctttgcgtagacctccacttcctcgacttctgctgaataacgtctcgtgtatgaga

SEQ ID NO: 870 - DNA, 101 bp, Solanum lycopersicum
  source 1..101: mol_type = unassigned DNA
caacaatatagggacgaggtcaataacaacgagcacaacaacaacaacaataatagtaacgtttgggatcagagtgaaaaatacaaagcggatattttaaa

SEQ ID NO: 871 - DNA, 101 bp, Solanum lycopersicum
  source 1..101: mol_type = unassigned DNA
caacaatatagggacgaggtcaataacaacgagcacaacaacaacaacaacaatagtaacgtttgggatcagagtgaaaaatacaaagcggatattttaaa

SEQ ID NO: 872 - DNA, 101 bp, Solanum lycopersicum
  source 1..101: mol_type = unassigned DNA
ataataggaggccaacaagccttataagacgcaactcgtgctcttggtgatcctcccttagctgttccattgccatatccgaaaatgttagctccctcgac

SEQ ID NO: 873 - DNA, 101 bp, Solanum lycopersicum
  source 1..101: mol_type = unassigned DNA
ataataggaggccaacaagccttataagacgcaactcgtgctcttggtgaccctcccttagctgttccattgccatatccgaaaatgttagctccctcgac

SEQ ID NO: 874 - DNA, 101 bp, Solanum lycopersicum
  source 1..101: mol_type = unassigned DNA
cttgccaaacaagagtataagttccacaatggaaatgccaagagcaggggtcttctcacagcagcaaggaaccaggaattttcaatctggaagttcaccgc

SEQ ID NO: 875 - DNA, 101 bp, Solanum lycopersicum
  source 1..101: mol_type = unassigned DNA
cttgccaaacaagagtataagttccacaatggaaatgccaagagcaggggccttctcacagcagcaaggaaccaggaattttcaatctggaagttcaccgc

SEQ ID NO: 876 - DNA, 101 bp, Solanum lycopersicum
  source 1..101: mol_type = unassigned DNA
attcagatttcgagctacaacttttcttactttccagtatcctctactgcttgaacccgagatttaacgtctgattcggacattggatcccgaattgatcc

SEQ ID NO: 877 - DNA, 101 bp, Solanum lycopersicum
  source 1..101: mol_type = unassigned DNA
attcagatttcgagctacaacttttcttactttccagtatcctctactgcctgaacccgagatttaacgtctgattcggacattggatcccgaattgatcc

SEQ ID NO: 878 - DNA, 101 bp, Solanum lycopersicum
  source 1..101: mol_type = unassigned DNA
catttagttcacactgatctgatcagctgctaaacacgcgagtacaaggaagcagaggtaacatttcagattattcactttcgagtacattctgtctaaga

SEQ ID NO: 879 - DNA, 101 bp, Solanum lycopersicum
  source 1..101: mol_type = unassigned DNA
catttagttcacactgatctgatcagctgctaaacacgcgagtacaaggaggcagaggtaacatttcagattattcactttcgagtacattctgtctaaga

SEQ ID NO: 880 - DNA, 101 bp, Solanum lycopersicum
  source 1..101: mol_type = unassigned DNA
ttaacaataccagcattaatgttgaacagatcatcacgggtcataccaggtttccgtggcacaccagctggaataatgacaacatcagctccctccaaagc

SEQ ID NO: 881 - DNA, 101 bp, Solanum lycopersicum
  source 1..101: mol_type = unassigned DNA
ttaacaataccagcattaatgttgaacagatcatcacgggtcataccaggcttccgtggcacaccagctggaataatgacaacatcagctccctccaaagc

SEQ ID NO: 882 - DNA, 101 bp, Solanum lycopersicum
  source 1..101: mol_type = unassigned DNA
caatccaagtttacattataaagatctggaagaagcctacttgtggaagtaacattttcatctttaccaggtacagatactgagactgaagaatcactcca

SEQ ID NO: 883 - DNA, 101 bp, Solanum lycopersicum
  source 1..101: mol_type = unassigned DNA
caatccaagtttacattataaagatctggaagaagcctacttgtggaagttacattttcatctttaccaggtacagatactgagactgaagaatcactcca

SEQ ID NO: 884 - DNA, 101 bp, Solanum lycopersicum
  source 1..101: mol_type = unassigned DNA
ttaaaatttgttcattttgcttggtagtgaagttgaggcctccgttaatctgtggtcatcaaacccgattcttaacatacctcatatatttggcagaagag

SEQ ID NO: 885 - DNA, 101 bp, Solanum lycopersicum
  source 1..101: mol_type = unassigned DNA
ttaaaatttgttcattttgcttggtagtgaagttgaggcctccgttaatccgtggtcatcaaacccgattcttaacatacctcatatatttggcagaagag

SEQ ID NO: 886 - DNA, 101 bp, Solanum lycopersicum
  source 1..101: mol_type = unassigned DNA
cagggtggtttgcatggctattttccgtcatctaaggttcttgtttggtgtgattccaagtgatcacggtgcaaccgagactactgtgaaccttggaagga

SEQ ID NO: 887 - DNA, 101 bp, Solanum lycopersicum
  source 1..101: mol_type = unassigned DNA
cagggtggtttgcatggctattttccgtcatctaaggttcttgtttggtgggattccaagtgatcacggtgcaaccgagactactgtgaaccttggaagga

SEQ ID NO: 888 - DNA, 101 bp, Solanum lycopersicum
  source 1..101: mol_type = unassigned DNA
aataaaaaaacaaatcaaatcgacaaacaatacatatctggttaactgagtgaagatgagatgccattcttgttgccactgacagacgagggttttccaac

SEQ ID NO: 889 - DNA, 101 bp, Solanum lycopersicum
  source 1..101: mol_type = unassigned DNA
aataaaaaaacaaatcaaatcgacaaacaatacatatctggttaactgagcgaagatgagatgccattcttgttgccactgacagacgagggttttccaac

SEQ ID NO: 890 - DNA, 101 bp, Solanum lycopersicum
  source 1..101: mol_type = unassigned DNA
cagagagaccggccagcattgggaaccaaaaatgctctgtgacgtcacacctctcatcttcagtagtgtcaactggcttcagagcaccaccaggtataaga

SEQ ID NO: 891 - DNA, 101 bp, Solanum lycopersicum
  source 1..101: mol_type = unassigned DNA
cagagagaccggccagcattgggaaccaaaaatgctctgtgacgtcacacgtctcatcttcagtagtgtcaactggcttcagagcaccaccaggtataaga

SEQ ID NO: 892 - DNA, 101 bp, Solanum lycopersicum
  source 1..101: mol_type = unassigned DNA
gaactaggagcaggacatccaagaagagcaaagctttcagtattagtggtatcaataacttcacttgtaattggtgcattattgacaatattactcttact

SEQ ID NO: 893 - DNA, 101 bp, Solanum lycopersicum
  source 1..101: mol_type = unassigned DNA
gaactaggagcaggacatccaagaagagcaaagctttcagtattagtggtgtcaataacttcacttgtaattggtgcattattgacaatattactcttact

SEQ ID NO: 894 - DNA, 101 bp, Solanum lycopersicum
  source 1..101: mol_type = unassigned DNA
tagagggtcttcaggagataaaggtagtccgagtcaaactgtatcaagcttccatgcaacaccatatgaagttccattacaaacccagaatagatttcttt

SEQ ID NO: 895 - DNA, 101 bp, Solanum lycopersicum
  source 1..101: mol_type = unassigned DNA
tagagggtcttcaggagataaaggtagtccgagtcaaactgtatcaagctcccatgcaacaccatatgaagttccattacaaacccagaatagatttcttt

SEQ ID NO: 896 - DNA, 101 bp, Solanum lycopersicum
  source 1..101: mol_type = unassigned DNA
gaggacattatggagcgcataacagccatgaacttgatgaaacctcaaaaatgtaggctcaaacgaacaccaagtcatcctcgaaaacagaaacaagtaag

SEQ ID NO: 897 - DNA, 101 bp, Solanum lycopersicum
  source 1..101: mol_type = unassigned DNA
gaggacattatggagcgcataacagccatgaacttgatgaaacctcaaaactgtaggctcaaacgaacaccaagtcatcctcgaaaacagaaacaagtaag

SEQ ID NO: 898 - DNA, 101 bp, Solanum lycopersicum
  source 1..101: mol_type = unassigned DNA
gatgaaagccctggcagaaaatcaattgtgttctctcaattcaggaagtttttgctcctacttgaagagccgcttaaagcagctggttttaagatattgcg

SEQ ID NO: 899 - DNA, 101 bp, Solanum lycopersicum
  source 1..101: mol_type = unassigned DNA
gatgaaagccctggcagaaaatcaattgtgttctctcaattcaggaagttgttgctcctacttgaagagccgcttaaagcagctggttttaagatattgcg

SEQ ID NO: 900 - DNA, 101 bp, Solanum lycopersicum
  source 1..101: mol_type = unassigned DNA
taacatctatggtacgtttcaaagcacgccaaagaattagtgcaaagacaactttagcacatccatactttgatagagaaggtcttctagccctgtccttc

SEQ ID NO: 901 - DNA, 101 bp, Solanum lycopersicum
  source 1..101: mol_type = unassigned DNA
taacatctatggtacgtttcaaagcacgccaaagaattagtgcaaagacagctttagcacatccatactttgatagagaaggtcttctagccctgtccttc

SEQ ID NO: 902 - DNA, 101 bp, Solanum lycopersicum
  source 1..101: mol_type = unassigned DNA
ctttcttgagcctagctgcctgaatgtcatcaaacatgtgtgtccttctctccttccttgttagcatgaaatatatatgtatacatctgtttattttgtct

SEQ ID NO: 903 - DNA, 101 bp, Solanum lycopersicum
  source 1..101: mol_type = unassigned DNA
ctttcttgagcctagctgcctgaatgtcatcaaacatgtgtgtccttctccccttccttgttagcatgaaatatatatgtatacatctgtttattttgtct

SEQ ID NO: 904 - DNA, 101 bp, Solanum lycopersicum
  source 1..101: mol_type = unassigned DNA
caataggaacagaaattgatgggcactaagctgtcacatcaaatgtaatgaaagctgtccaatgttcaacgtgttggccacttatgccttatcaagaaata

SEQ ID NO: 905 - DNA, 101 bp, Solanum lycopersicum
  source 1..101: mol_type = unassigned DNA
caataggaacagaaattgatgggcactaagctgtcacatcaaatgtaatgtaagctgtccaatgttcaacgtgttggccacttatgccttatcaagaaata

SEQ ID NO: 906 - DNA, 101 bp, Solanum lycopersicum
  source 1..101: mol_type = unassigned DNA
agggaggttgtttccgatagtcccatagtttattccgacaccatgaacattgtagttaataagagagaggagaatgaagagggataagacaagagtacaaa

SEQ ID NO: 907 - DNA, 101 bp, Solanum lycopersicum
  source 1..101: mol_type = unassigned DNA
agggaggttgtttccgatagtcccatagtttattccgacaccatgaacatcgtagttaataagagagaggagaatgaagagggataagacaagagtacaaa

SEQ ID NO: 908 - DNA, 101 bp, Solanum lycopersicum
  source 1..101: mol_type = unassigned DNA
gaaaaggagcatcgaagcaacagtaaagttgtctctgagtgaattataggtaaggggtttaagccgtcagaatagtcactaatacttgtaattaggataga

SEQ ID NO: 909 - DNA, 101 bp, Solanum lycopersicum
  source 1..101: mol_type = unassigned DNA
gaaaaggagcatcgaagcaacagtaaagttgtctctgagtgaattataggcaaggggtttaagccgtcagaatagtcactaatacttgtaattaggataga

SEQ ID NO: 910 - DNA, 101 bp, Solanum lycopersicum
  source 1..101: mol_type = unassigned DNA
cagcggttgatgaaactgaactgctaggaacatctgacacttctcctgccacagttcccacatctttctttttggtcatgaaaagataagctacataaatt

SEQ ID NO: 911 - DNA, 101 bp, Solanum lycopersicum
  source 1..101: mol_type = unassigned DNA
cagcggttgatgaaactgaactgctaggaacatctgacacttctcctgcctcagttcccacatctttctttttggtcatgaaaagataagctacataaatt

SEQ ID NO: 912 - DNA, 101 bp, Solanum lycopersicum
  source 1..101: mol_type = unassigned DNA
aacttcactgaaacttcaatcaaaaaaaccatcttcttcggtaacccaacaaacaaacttctcagagtattgccggtgcatctgcttactcactttagcat

SEQ ID NO: 913 - DNA, 101 bp, Solanum lycopersicum
  source 1..101: mol_type = unassigned DNA
aacttcactgaaacttcaatcaaaaaaaccatcttcttcggtaacccaacgaacaaacttctcagagtattgccggtgcatctgcttactcactttagcat

SEQ ID NO: 914 - DNA, 101 bp, Solanum lycopersicum
  source 1..101: mol_type = unassigned DNA
cacctctatactgctgtagacaagcagagtccaatccagaggatgtttctaagaacacttgttagacaatcaacatcagatgacagtttactagcgtatca

SEQ ID NO: 915 - DNA, 101 bp, Solanum lycopersicum
  source 1..101: mol_type = unassigned DNA
cacctctatactgctgtagacaagcagagtccaatccagaggatgtttctcagaacacttgttagacaatcaacatcagatgacagtttactagcgtatca

SEQ ID NO: 916 - DNA, 101 bp, Solanum lycopersicum
  source 1..101: mol_type = unassigned DNA
gttcttcagcttacgttcttcagctcagcaacagttcgtccgcaagagctaagctcagctcagctcttcagtcttctgcttcctctcttcgatcttcagta

SEQ ID NO: 917 - DNA, 101 bp, Solanum lycopersicum
  source 1..101: mol_type = unassigned DNA
gttcttcagcttacgttcttcagctcagcaacagttcgtccgcaagagctgagctcagctcagctcttcagtcttctgcttcctctcttcgatcttcagta

SEQ ID NO: 918 - DNA, 101 bp, Solanum lycopersicum
  source 1..101: mol_type = unassigned DNA
cctgttttatttgttggacatctttcgaaaacttccaccttgatcatagataaaccttggattcaagtggttaaaactcttgatgctcaaccagttcacag

SEQ ID NO: 919 - DNA, 101 bp, Solanum lycopersicum
  source 1..101: mol_type = unassigned DNA
cctgttttatttgttggacatctttcgaaaacttccaccttgatcatagacaaaccttggattcaagtggttaaaactcttgatgctcaaccagttcacag

SEQ ID NO: 920 - DNA, 101 bp, Solanum lycopersicum
  source 1..101: mol_type = unassigned DNA
tatccagggattaagggcgaaggtcctgaatcaggtgagaagtctctccgaagaggctggaggcaaagggtctgccaagaaggacctaaacagtcaaagaa

SEQ ID NO: 921 - DNA, 101 bp, Solanum lycopersicum
  source 1..101: mol_type = unassigned DNA
tatccagggattaagggcgaaggtcctgaatcaggtgagaagtctctccgtagaggctggaggcaaagggtctgccaagaaggacctaaacagtcaaagaa

SEQ ID NO: 922 - DNA, 101 bp, Solanum lycopersicum
  source 1..101: mol_type = unassigned DNA
tccgaaactgttgaagtgtctgcactattcatattttgattcgaaccaactgaaccttcaagccatacagttggatttcttgacgcctttgtactggcacg

SEQ ID NO: 923 - DNA, 101 bp, Solanum lycopersicum
  source 1..101: mol_type = unassigned DNA
tccgaaactgttgaagtgtctgcactattcatattttgattcgaaccaaccgaaccttcaagccatacagttggatttcttgacgcctttgtactggcacg

SEQ ID NO: 924 - DNA, 101 bp, Solanum lycopersicum
  source 1..101: mol_type = unassigned DNA
gcaatcgggtatgggcaacgagtgcccatacgatttaaggttgcggggcgagtggatataaatttggtcacggtaacaatggttgcacctggatttaacac

SEQ ID NO: 925 - DNA, 101 bp, Solanum lycopersicum
  source 1..101: mol_type = unassigned DNA
gcaatcgggtatgggcaacgagtgcccatacgatttaaggttgcggggcgggtggatataaatttggtcacggtaacaatggttgcacctggatttaacac

SEQ ID NO: 926 - DNA, 101 bp, Solanum lycopersicum
  source 1..101: mol_type = unassigned DNA
aaccaatggccccaacctaggtgagagaactcaggcaaaccagagagaggagatgggacgtttgcaggatgtgaaggatgatttagtgttccggcaacttc

SEQ ID NO: 927 - DNA, 101 bp, Solanum lycopersicum
  source 1..101: mol_type = unassigned DNA
aaccaatggccccaacctaggtgagagaactcaggcaaaccagagagaggggatgggacgtttgcaggatgtgaaggatgatttagtgttccggcaacttc

SEQ ID NO: 928 - DNA, 101 bp, Solanum lycopersicum
  source 1..101: mol_type = unassigned DNA
caacaacacaaaaatggtttacgcacacgccatgggttagaaaataatcaagaatttcaacatcaaccgtataaaaatggtttaggcccacgtcacgggtt

SEQ ID NO: 929 - DNA, 101 bp, Solanum lycopersicum
  source 1..101: mol_type = unassigned DNA
caacaacacaaaaatggtttacgcacacgccatgggttagaaaataatcaggaatttcaacatcaaccgtataaaaatggtttaggcccacgtcacgggtt

SEQ ID NO: 930 - DNA, 20 bp, synthetic construct
  misc_feature 1..20: note = Description of Artificial Sequence: Synthetic primer
  source 1..20: mol_type = other DNA
tgtggcctggagagggtagg

SEQ ID NO: 931 - DNA, 23 bp, synthetic construct
  misc_feature 1..23: note = Description of Artificial Sequence: Synthetic primer
  source 1..23: mol_type = other DNA
tctccacccttcaaaggtagagg

SEQ ID NO: 932 - DNA, 26 bp, synthetic construct
  misc_feature 1..26: note = Description of Artificial Sequence: Synthetic primer
  source 1..26: mol_type = other DNA
gatctgttgtacttctttcttgcagc

SEQ ID NO: 933 - DNA, 32 bp, synthetic construct
  misc_feature 1..32: note = Description of Artificial Sequence: Synthetic primer
  source 1..32: mol_type = other DNA
gtcgaaattattgattcctaaatcttttcgtg

SEQ ID NO: 934 - DNA, 25 bp, synthetic construct
  misc_feature 1..25: note = Description of Artificial Sequence: Synthetic primer
  source 1..25: mol_type = other DNA
ggaggaaaaagataccctttgttgc

SEQ ID NO: 935 - DNA, 24 bp, synthetic construct
  misc_feature 1..24: note = Description of Artificial Sequence: Synthetic primer
  source 1..24: mol_type = other DNA
cttgcatcccttcaaaaatggcaa

SEQ ID NO: 936 - DNA, 24 bp, synthetic construct
  misc_feature 1..24: note = Description of Artificial Sequence: Synthetic primer
  source 1..24: mol_type = other DNA
gtggtgaggctggaaatgtaatcc

SEQ ID NO: 937 - DNA, 22 bp, synthetic construct
  misc_feature 1..22: note = Description of Artificial Sequence: Synthetic primer
  source 1..22: mol_type = other DNA
acgtcaagaaccggaatgttcc

SEQ ID NO: 938 - DNA, 27 bp, synthetic construct
  misc_feature 1..27: note = Description of Artificial Sequence: Synthetic primer
  source 1..27: mol_type = other DNA
ccactatacaagatggaggctggtaag

SEQ ID NO: 939 - DNA, 27 bp, synthetic construct
  misc_feature 1..27: note = Description of Artificial Sequence: Synthetic primer
  source 1..27: mol_type = other DNA
atgtcctcatacctacattgcaaaatc

SEQ ID NO: 940 - DNA, 22 bp, synthetic construct
  misc_feature 1..22: note = Description of Artificial Sequence: Synthetic primer
  source 1..22: mol_type = other DNA
cgcgtaacatttgtgtccaacg

SEQ ID NO: 941 - DNA, 28 bp, synthetic construct
  misc_feature 1..28: note = Description of Artificial Sequence: Synthetic primer
  source 1..28: mol_type = other DNA
gacagacaacagtacaatgatagcttgg

SEQ ID NO: 942 - DNA, 28 bp, synthetic construct
  misc_feature 1..28: note = Description of Artificial Sequence: Synthetic primer
  source 1..28: mol_type = other DNA
gacagtaagatggagaattttgttcctg

SEQ ID NO: 943 - DNA, 20 bp, synthetic construct
  misc_feature 1..20: note = Description of Artificial Sequence: Synthetic primer
  source 1..20: mol_type = other DNA
ctccacgcctccatttctcg

SEQ ID NO: 944 - DNA, 25 bp, synthetic construct
  misc_feature 1..25: note = Description of Artificial Sequence: Synthetic primer
  source 1..25: mol_type = other DNA
agtgaagatagcctccaagcatttc

SEQ ID NO: 945 - DNA, 23 bp, synthetic construct
  misc_feature 1..23: note = Description of Artificial Sequence: Synthetic primer
  source 1..23: mol_type = other DNA
atgttcgggggtaatctcactcc

SEQ ID NO: 946 - DNA, 19 bp, synthetic construct
  misc_feature 1..19: note = Description of Artificial Sequence: Synthetic primer
  source 1..19: mol_type = other DNA
aacaacaacaacggggccc

SEQ ID NO: 947 - DNA, 29 bp, synthetic construct
  misc_feature 1..29: note = Description of Artificial Sequence: Synthetic primer
  source 1..29: mol_type = other DNA
ggttgttgttgttattgttatcaaactgg

SEQ ID NO: 948 - DNA, 22 bp, synthetic construct
  misc_feature 1..22: note = Description of Artificial Sequence: Synthetic primer
  source 1..22: mol_type = other DNA
cccattgaacagcatggcaatg

SEQ ID NO: 949 - DNA, 24 bp, synthetic construct
  misc_feature 1..24: note = Description of Artificial Sequence: Synthetic primer
  source 1..24: mol_type = other DNA
ttagcaggaatttccatcattgcg

SEQ ID NO: 950 - DNA, 27 bp, synthetic construct
  misc_feature 1..27: note = Description of Artificial Sequence: Synthetic primer
  source 1..27: mol_type = other DNA
gctttgtgattaggtaaaggtgatcac

SEQ ID NO: 951 - DNA, 22 bp, synthetic construct
  misc_feature 1..22: note = Description of Artificial Sequence: Synthetic primer
  source 1..22: mol_type = other DNA
accatcttcgccatccttgtct

SEQ ID NO: 952 - DNA, 22 bp, synthetic construct
  misc_feature 1..22: note = Description of Artificial Sequence: Synthetic primer
  source 1..22: mol_type = other DNA
tttcgcttgtgcctcttctccc

SEQ ID NO: 953 - DNA, 24 bp, synthetic construct
  misc_feature 1..24: note = Description of Artificial Sequence: Synthetic primer
  source 1..24: mol_type = other DNA
cccgttgcattcctcttacactag

SEQ ID NO: 954 - DNA, 24 bp, synthetic construct
  misc_feature 1..24: note = Description of Artificial Sequence: Synthetic primer
  source 1..24: mol_type = other DNA
cagaaacaactgcatccactgaag

SEQ ID NO: 955 - DNA, 31 bp, synthetic construct
  misc_feature 1..31: note = Description of Artificial Sequence: Synthetic primer
  source 1..31: mol_type = other DNA
actggaatattctctacccctaatatttctg

SEQ ID NO: 956 - DNA, 29 bp, synthetic construct
  misc_feature 1..29: note = Description of Artificial Sequence: Synthetic primer
  source 1..29: mol_type = other DNA
gtcgtctcatggatgatgatatctctaag

SEQ ID NO: 957 - DNA, 23 bp, synthetic construct
  misc_feature 1..23: note = Description of Artificial Sequence: Synthetic primer
  source 1..23: mol_type = other DNA
gcagatgcatcagttctggaaac

SEQ ID NO: 958 - DNA, 23 bp, synthetic construct
  misc_feature 1..23: note = Description of Artificial Sequence: Synthetic primer
  source 1..23: mol_type = other DNA
gctgaacttcttgccaccttctg

SEQ ID NO: 959 - DNA, 31 bp, synthetic construct
  misc_feature 1..31: note = Description of Artificial Sequence: Synthetic primer
  source 1..31: mol_type = other DNA
tcttcaatagcttcatcactcaatttctcac

SEQ ID NO: 960 - DNA, 22 bp, synthetic construct
  misc_feature 1..22: note = Description of Artificial Sequence: Synthetic primer
  source 1..22: mol_type = other DNA
gagctgaagcagagtttcccac

SEQ ID NO: 961 - DNA, 24 bp, synthetic construct
  misc_feature 1..24: note = Description of Artificial Sequence: Synthetic primer
  source 1..24: mol_type = other DNA
caggacacaactggcatacttttg

SEQ ID NO: 962 - DNA, 25 bp, synthetic construct
  misc_feature 1..25: note = Description of Artificial Sequence: Synthetic primer
  source 1..25: mol_type = other DNA
gtggaaggaagtacagagaagaagc

SEQ ID NO: 963 - DNA, 24 bp, synthetic construct
  misc_feature 1..24: note = Description of Artificial Sequence: Synthetic primer
  source 1..24: mol_type = other DNA
gctctggaaaaaacaatctcccac

SEQ ID NO: 964 - DNA, 23 bp, synthetic construct
  misc_feature 1..23: note = Description of Artificial Sequence: Synthetic primer
  source 1..23: mol_type = other DNA
acaggaacatcgtcaacaccttg

SEQ ID NO: 965 - DNA, 24 bp, synthetic construct
  misc_feature 1..24: note = Description of Artificial Sequence: Synthetic primer
  source 1..24: mol_type = other DNA
ttctggcgaaaatagttcctccac

SEQ ID NO: 966 - DNA, 26 bp, synthetic construct
  misc_feature 1..26: note = Description of Artificial Sequence: Synthetic primer
  source 1..26: mol_type = other DNA
tgaagacatcaatgattgacagtgct

SEQ ID NO: 967 - DNA, 22 bp, synthetic construct
  misc_feature 1..22: note = Description of Artificial Sequence: Synthetic primer
  source 1..22: mol_type = other DNA
taggagcttcttcccaccctgg

SEQ ID NO: 968 - DNA, 23 bp, synthetic construct
  misc_feature 1..23: note = Description of Artificial Sequence: Synthetic primer
  source 1..23: mol_type = other DNA
ttcatcttgagggagctcacatg

SEQ ID NO: 969 - DNA, 23 bp, synthetic construct
  misc_feature 1..23: note = Description of Artificial Sequence: Synthetic primer
  source 1..23: mol_type = other DNA
caccagctgatctgaaatcgggg

SEQ ID NO: 970 - DNA, 22 bp, synthetic construct
  misc_feature 1..22: note = Description of Artificial Sequence: Synthetic primer
  source 1..22: mol_type = other DNA
aactctgtgtggcctgacaatg

SEQ ID NO: 971 - DNA, 31 bp, synthetic construct
  misc_feature 1..31: note = Description of Artificial Sequence: Synthetic primer
  source 1..31: mol_type = other DNA
gggaaatttattttctgactgaacttttctc

SEQ ID NO: 972 - DNA, 24 bp, synthetic construct
  misc_feature 1..24: note = Description of Artificial Sequence: Synthetic primer
  source 1..24: mol_type = other DNA
tgtccaagtatccctcattgtggg

SEQ ID NO: 973 - DNA, 25 bp, synthetic construct
  misc_feature 1..25: note = Description of Artificial Sequence: Synthetic primer
  source 1..25: mol_type = other DNA
ttctacttcacagaactcatcggtc

SEQ ID NO: 974 - DNA, 23 bp, synthetic construct
  misc_feature 1..23: note = Description of Artificial Sequence: Synthetic primer
  source 1..23: mol_type = other DNA
acaatggcaatttggagcaatgg

SEQ ID NO: 975 - DNA, 25 bp, synthetic construct
  misc_feature 1..25: note = Description of Artificial Sequence: Synthetic primer
  source 1..25: mol_type = other DNA
tcagtctgatttcccaagttagagg

SEQ ID NO: 976 - DNA, 27 bp, synthetic construct
  misc_feature 1..27: note = Description of Artificial Sequence: Synthetic primer
  source 1..27: mol_type = other DNA
cactgtgaagagaatatgatgagagga

SEQ ID NO: 977 - DNA, 26 bp, synthetic construct
  misc_feature 1..26: note = Description of Artificial Sequence: Synthetic primer
  source 1..26: mol_type = other DNA
gctctagcaaataatgtcaatgtgca

SEQ ID NO: 978 - DNA, 30 bp, synthetic construct
  misc_feature 1..30: note = Description of Artificial Sequence: Synthetic primer
  source 1..30: mol_type = other DNA
caactactaaacggtcaattttaagtgagc

SEQ ID NO: 979 - DNA, 31 bp, synthetic construct
  misc_feature 1..31: note = Description of Artificial Sequence: Synthetic primer
  source 1..31: mol_type = other DNA
tgttttctggtttgatatttagagaaatggg

SEQ ID NO: 980 - DNA, 24 bp, synthetic construct
  misc_feature 1..24: note = Description of Artificial Sequence: Synthetic primer
  source 1..24: mol_type = other DNA
cactgaagcattagcctttgtctc

SEQ ID NO: 981 - DNA, 23 bp, synthetic construct
  misc_feature 1..23: note = Description of Artificial Sequence: Synthetic primer
  source 1..23: mol_type = other DNA
ggaacagaacatttggggctacc

SEQ ID NO: 982 - DNA, 20 bp, synthetic construct
  misc_feature 1..20: note = Description of Artificial Sequence: Synthetic primer
  source 1..20: mol_type = other DNA
atctcggcgagcttggtgac

SEQ ID NO: 983 - DNA, 23 bp, synthetic construct
  misc_feature 1..23: note = Description of Artificial Sequence: Synthetic primer
  source 1..23: mol_type = other DNA
cgcactctccatggcatcttatg

SEQ ID NO: 984 - DNA, 26 bp, synthetic construct
  misc_feature 1..26: note = Description of Artificial Sequence: Synthetic primer
  source 1..26: mol_type = other DNA
tggtgattcctgttcatagatttggc

SEQ ID NO: 985 - DNA, 33 bp, synthetic construct
  misc_feature 1..33: note = Description of Artificial Sequence: Synthetic primer
  source 1..33: mol_type = other DNA
cagttttttatagtccatacacgaatttaaggc

SEQ ID NO: 986 - DNA, 31 bp, synthetic construct
  misc_feature 1..31: note = Description of Artificial Sequence: Synthetic primer
  source 1..31: mol_type = other DNA
ttcttacttcttcaataaacctcaggaattc

SEQ ID NO: 987 - DNA, 22 bp, synthetic construct
  misc_feature 1..22: note = Description of Artificial Sequence: Synthetic primer
  source 1..22: mol_type = other DNA
atcggaatcaacgtcaatggcg

SEQ ID NO: 988 - DNA, 23 bp, synthetic construct
  misc_feature 1..23: note = Description of Artificial Sequence: Synthetic primer
  source 1..23: mol_type = other DNA
attggttgttcgagtttgctcag

SEQ ID NO: 989 - DNA, 19 bp, synthetic construct
  misc_feature 1..19: note = Description of Artificial Sequence: Synthetic primer
  source 1..19: mol_type = other DNA
gggcatccggatcaatgcc

SEQ ID NO: 990 - DNA, 29 bp, synthetic construct
  misc_feature 1..29: note = Description of Artificial Sequence: Synthetic primer
  source 1..29: mol_type = other DNA
agagtttagatccaagactgtgaattagg

SEQ ID NO: 991 - DNA, 27 bp, synthetic construct
  misc_feature 1..27: note = Description of Artificial Sequence: Synthetic primer
  source 1..27: mol_type = other DNA
tgacatactttctatcttgccatgtgg

SEQ ID NO: 992 - DNA, 26 bp, synthetic construct
  misc_feature 1..26: note = Description of Artificial Sequence: Synthetic primer
  source 1..26: mol_type = other DNA
gccaacagggaacaagagactaaagg

SEQ ID NO: 993 - DNA, 24 bp, synthetic construct
  misc_feature 1..24: note = Description of Artificial Sequence: Synthetic primer
  source 1..24: mol_type = other DNA
cagcttgaagttcagcctctatcc

SEQ ID NO: 994 - DNA, 30 bp, synthetic construct
  misc_feature 1..30: note = Description of Artificial Sequence: Synthetic primer
  source 1..30: mol_type = other DNA
gacttgagaataaagcgaaattcctctttg

SEQ ID NO: 995 - DNA, 26 bp, synthetic construct
  misc_feature 1..26: note = Description of Artificial Sequence: Synthetic primer
  source 1..26: mol_type = other DNA
tgtgcatggattcaactgttaggttg

SEQ ID NO: 996 - DNA, 35 bp, synthetic construct
  misc_feature 1..35: note = Description of Artificial Sequence: Synthetic primer
  source 1..35: mol_type = other DNA
tgttgaaaccaaaattatacatagaatatctgtcc

SEQ ID NO: 997 - DNA, 28 bp, synthetic construct
  misc_feature 1..28: note = Description of Artificial Sequence: Synthetic primer
  source 1..28: mol_type = other DNA
gtgtaatcttcaatgtccctcatgagag

SEQ ID NO: 998 - DNA, 32 bp, synthetic construct
  misc_feature 1..32: note = Description of Artificial Sequence: Synthetic primer
  source 1..32: mol_type = other DNA
agtatcattttgaaagatacaaagcaaacaag

SEQ ID NO: 999 - DNA, 34 bp, synthetic construct
  misc_feature 1..34: note = Description of Artificial Sequence: Synthetic primer
  source 1..34: mol_type = other DNA
ttctagatataaaaatcttacaaattcgtgcaag

SEQ ID NO: 1000 - DNA, 19 bp, synthetic construct
  misc_feature 1..19: note = Description of Artificial Sequence: Synthetic primer
  source 1..19: mol_type = other DNA
tccctggccaaacaacccc

SEQ ID NO: 1001 - DNA, 22 bp, synthetic construct
  misc_feature 1..22: note = Description of Artificial Sequence: Synthetic primer
  source 1..22: mol_type = other DNA
aggcatggaagcagatgtcttc

SEQ ID NO: 1002 - DNA, 24 bp, synthetic construct
  misc_feature 1..24: note = Description of Artificial Sequence: Synthetic primer
  source 1..24: mol_type = other DNA
aaggattttgcgaaggaggctaaa

SEQ ID NO: 1003 - DNA, 29 bp, synthetic construct
  misc_feature 1..29: note = Description of Artificial Sequence: Synthetic primer
  source 1..29: mol_type = other DNA
cctcttaatcctactacattaggatgcct

SEQ ID NO: 1004 - DNA, 25 bp, synthetic construct
  misc_feature 1..25: note = Description of Artificial Sequence: Synthetic primer
  source 1..25: mol_type = other DNA
caattgtcaaagactcgtaacctgc

SEQ ID NO: 1005 - DNA, 27 bp, synthetic construct
  misc_feature 1..27: note = Description of Artificial Sequence: Synthetic primer
  source 1..27: mol_type = other DNA
gcaaaagagaagaaaaaacacctgttc

SEQ ID NO: 1006 - DNA, 21 bp, synthetic construct
  misc_feature 1..21: note = Description of Artificial Sequence: Synthetic primer
  source 1..21: mol_type = other DNA
caagaggaggcagaggagtgg

SEQ ID NO: 1007 - DNA, 22 bp, synthetic construct
  misc_feature 1..22: note = Description of Artificial Sequence: Synthetic primer
  source 1..22: mol_type = other DNA
tttgcttccttggcagcaatgc

SEQ ID NO: 1008 - DNA, 21 bp, synthetic construct
  misc_feature 1..21: note = Description of Artificial Sequence: Synthetic primer
  source 1..21: mol_type = other DNA
ggcagtaccacgaagcttgac

SEQ ID NO: 1009 - DNA, 28 bp, synthetic construct
  misc_feature 1..28: note = Description of Artificial Sequence: Synthetic primer
  source 1..28: mol_type = other DNA
aaacctttaagaatggtgaaaactgtgc

SEQ ID NO: 1010 - DNA, 27 bp, synthetic construct
  misc_feature 1..27: note = Description of Artificial Sequence: Synthetic primer
  source 1..27: mol_type = other DNA
tgatgcaaaagaagaatgttgatgctg

SEQ ID NO: 1011 - DNA, 27 bp, synthetic construct
  misc_feature 1..27: note = Description of Artificial Sequence: Synthetic primer
  source 1..27: mol_type = other DNA
tcgcaaccaatccttgtaatctaatgg

SEQ ID NO: 1012 - DNA, 31 bp, synthetic construct
  misc_feature 1..31: note = Description of Artificial Sequence: Synthetic primer
  source 1..31: mol_type = other DNA
gttctgaaccagtgtaattatgttgttcttg

SEQ ID NO: 1013 - DNA, 26 bp, synthetic construct
  misc_feature 1..26: note = Description of Artificial Sequence: Synthetic primer
  source 1..26: mol_type = other DNA
aggctcaaaacccatgtcaatcatac

SEQ ID NO: 1014 - DNA, 23 bp, synthetic construct
  misc_feature 1..23: note = Description of Artificial Sequence: Synthetic primer
  source 1..23: mol_type = other DNA
atcaaagagcgggaggattaagc

SEQ ID NO: 1015 - DNA, 26 bp, synthetic construct
  misc_feature 1..26: note = Description of Artificial Sequence: Synthetic primer
  source 1..26: mol_type = other DNA
ttgcttgtttgctactccatttgatg

SEQ ID NO: 1016 - DNA, 26 bp, synthetic construct
  misc_feature 1..26: note = Description of Artificial Sequence: Synthetic primer
  source 1..26: mol_type = other DNA
gaagcaaaagtagatccagaatccag

SEQ ID NO: 1017 - DNA, 27 bp, synthetic construct
  misc_feature 1..27: note = Description of Artificial Sequence: Synthetic primer
  source 1..27: mol_type = other DNA
ggtcagaaccagaaatcttttacaagc

SEQ ID NO: 1018 - DNA, 19 bp, synthetic construct
  misc_feature 1..19: note = Description of Artificial Sequence: Synthetic primer
  source 1..19: mol_type = other DNA
ggcaattgggagttgggcc

SEQ ID NO: 1019 - DNA, 26 bp, synthetic construct
  misc_feature 1..26: note = Description of Artificial Sequence: Synthetic primer
  source 1..26: mol_type = other DNA
ggagcatcatctcagattcattgagc

SEQ ID NO: 1020 - DNA, 19 bp, synthetic construct
  misc_feature 1..19: note = Description of Artificial Sequence: Synthetic primer
  source 1..19: mol_type = other DNA
tggtgggcaggggattctg

SEQ ID NO: 1021 - DNA, 29 bp, synthetic construct
  misc_feature 1..29: note = Description of Artificial Sequence: Synthetic primer
  source 1..29: mol_type = other DNA
tgtggaacaaattcaagtactacatttcg

SEQ ID NO: 1022 - DNA, 25 bp, synthetic construct
  misc_feature 1..25: note = Description of Artificial Sequence: Synthetic primer
  source 1..25: mol_type = other DNA
actcttccaaacctaccgcaaaaga

SEQ ID NO: 1023 - DNA, 28 bp, synthetic construct
  misc_feature 1..28: note = Description of Artificial Sequence: Synthetic primer
  source 1..28: mol_type = other DNA
tcctgacaactcaagtcatatatagggg

SEQ ID NO: 1024 - DNA, 21 bp, synthetic construct
  misc_feature 1..21: note = Description of Artificial Sequence: Synthetic primer
  source 1..21: mol_type = other DNA
cccctctagtagccagccaag

SEQ ID NO: 1025 - DNA, 27 bp, synthetic construct
  misc_feature 1..27: note = Description of Artificial Sequence: Synthetic primer
  source 1..27: mol_type = other DNA
ggaagttttgatgcagtttacatttcc

SEQ ID NO: 1026 - DNA, 30 bp, synthetic construct
  misc_feature 1..30: note = Description of Artificial Sequence: Synthetic primer
  source 1..30: mol_type = other DNA
ataagctttgccattgtaagagataagatc

SEQ ID NO: 1027 - DNA, 30 bp, synthetic construct
  misc_feature 1..30: note = Description of Artificial Sequence: Synthetic primer
  source 1..30: mol_type = other DNA
agtctaagaacatattcacagtccaatttg

SEQ ID NO: 1028 - DNA, 25 bp, synthetic construct
  misc_feature 1..25: note = Description of Artificial Sequence: Synthetic primer
  source 1..25: mol_type = other DNA
actgacaaaaaagggccttcaatgg

SEQ ID NO: 1029 - DNA, 22 bp, synthetic construct
  misc_feature 1..22: note = Description of Artificial Sequence: Synthetic primer
  source 1..22: mol_type = other DNA
ggcacagagaaccaccaaattc

SEQ ID NO: 1030 - DNA, 19 bp, synthetic construct
  misc_feature 1..19: note = Description of Artificial Sequence: Synthetic primer
  source 1..19: mol_type = other DNA
gccagccatttcttcgccg

SEQ ID NO: 1031 - DNA, 28 bp, synthetic construct
  misc_feature 1..28: note = Description of Artificial Sequence: Synthetic primer
  source 1..28: mol_type = other DNA
gagttcctcccctatttgatagataacg

SEQ ID NO: 1032 - DNA, 22 bp, synthetic construct
  misc_feature 1..22: note = Description of Artificial Sequence: Synthetic primer
  source 1..22: mol_type = other DNA
gctccgttcattccttcctagc

SEQ ID NO: 1033 - DNA, 26 bp, synthetic construct
  misc_feature 1..26: note = Description of Artificial Sequence: Synthetic primer
  source 1..26: mol_type = other DNA
gcagagtcaagttgagaagcttaagc

SEQ ID NO: 1034 - DNA, 19 bp, synthetic construct
  misc_feature 1..19: note = Description of Artificial Sequence: Synthetic primer
  source 1..19: mol_type = other DNA
cgcttgtgttgttggtgcc

SEQ ID NO: 1035 - DNA, 26 bp, synthetic construct
  misc_feature 1..26: note = Description of Artificial Sequence: Synthetic primer
  source 1..26: mol_type = other DNA
taagcttaaattttctaggcagcagc

SEQ ID NO: 1036 - DNA, 23 bp, synthetic construct
  misc_feature 1..23: note = Description of Artificial Sequence: Synthetic primer
  source 1..23: mol_type = other DNA
cagaaattcgggtttcggttcag

SEQ ID NO: 1037 - DNA, 24 bp, synthetic construct
  misc_feature 1..24: note = Description of Artificial Sequence: Synthetic primer
  source 1..24: mol_type = other DNA
aaggggtgccattcaagttaattg

SEQ ID NO: 1038 - DNA, 29 bp, synthetic construct
  misc_feature 1..29: note = Description of Artificial Sequence: Synthetic primer
  source 1..29: mol_type = other DNA
attcatcaattttttcctgcatcagtttc

SEQ ID NO: 1039 - DNA, 21 bp, synthetic construct
  misc_feature 1..21: note = Description of Artificial Sequence: Synthetic primer
  source 1..21: mol_type = other DNA
tcaagcgaaggcctgaagaag

SEQ ID NO: 1040 - DNA, 23 bp, synthetic construct
  misc_feature 1..23: note = Description of Artificial Sequence: Synthetic primer
  source 1..23: mol_type = other DNA
gcattatctttcaggccagagcg

SEQ ID NO: 1041 - DNA, 24 bp, synthetic construct
  misc_feature 1..24: note = Description of Artificial Sequence: Synthetic primer
  source 1..24: mol_type = other DNA
tgaactcgaaatcttgacccctga

SEQ ID NO: 1042 - DNA, 22 bp, synthetic construct
  misc_feature 1..22: note = Description of Artificial Sequence: Synthetic primer
  source 1..22: mol_type = other DNA
cttcgacgtctaaggcttttgc

SEQ ID NO: 1043 - DNA, 27 bp, synthetic construct
  misc_feature 1..27: note = Description of Artificial Sequence: Synthetic primer
  source 1..27: mol_type = other DNA
cagggatgcgatgagagaacaaatatg

SEQ ID NO: 1044 - DNA, 29 bp, synthetic construct
  misc_feature 1..29: note = Description of Artificial Sequence: Synthetic primer
  source 1..29: mol_type = other DNA
atcagcttatgaactccaaacgttgtttg

SEQ ID NO: 1045 - DNA, 27 bp, synthetic construct
  misc_feature 1..27: note = Description of Artificial Sequence: Synthetic primer
  source 1..27: mol_type = other DNA
ctggtaaatgaactgatggtcaaagag

SEQ ID NO: 1046 - DNA, 22 bp, synthetic construct
  misc_feature 1..22: note = Description of Artificial Sequence: Synthetic primer
  source 1..22: mol_type = other DNA
atccaatatcgaggcagggttg

SEQ ID NO: 1047 - DNA, 28 bp, synthetic construct
  misc_feature 1..28: note = Description of Artificial Sequence: Synthetic primer
  source 1..28: mol_type = other DNA
tctcaccagagtctgctaatttagagtc

SEQ ID NO: 1048 - DNA, 26 bp, synthetic construct
  misc_feature 1..26: note = Description of Artificial Sequence: Synthetic primer
  source 1..26: mol_type = other DNA
accacaagtacacaactaaagctttg

SEQ ID NO: 1049 - DNA, 26 bp, synthetic construct
  misc_feature 1..26: note = Description of Artificial Sequence: Synthetic primer
  source 1..26: mol_type = other DNA
gttggtatgttcgtcaagactgaaac

SEQ ID NO: 1050 - DNA, 28 bp, synthetic construct
  misc_feature 1..28: note = Description of Artificial Sequence: Synthetic primer
  source 1..28: mol_type = other DNA
tgagctgataatgtactatctaaagcgg

SEQ ID NO: 1051 - DNA, 31 bp, synthetic construct
  misc_feature 1..31: note = Description of Artificial Sequence: Synthetic primer
  source 1..31: mol_type = other DNA
aatgttgagttctgatatgacttcaaaaagg

SEQ ID NO: 1052 - DNA, 28 bp, synthetic construct
  misc_feature 1..28: note = Description of Artificial Sequence: Synthetic primer
  source 1..28: mol_type = other DNA
gttcacccaactcttcaattcttgaatc

SEQ ID NO: 1053 - DNA, 35 bp, synthetic construct
  misc_feature 1..35: note = Description of Artificial Sequence: Synthetic primer
  source 1..35: mol_type = other DNA
acagattctcctactttcttattcaacaagatttg

SEQ ID NO: 1054 - DNA, 29 bp, synthetic construct
  misc_feature 1..29: note = Description of Artificial Sequence: Synthetic primer
  source 1..29: mol_type = other DNA
tcacatttttcgtgcagataaagtatacc

SEQ ID NO: 1055 - DNA, 22 bp, synthetic construct
  misc_feature 1..22: note = Description of Artificial Sequence: Synthetic primer
  source 1..22: mol_type = other DNA
gggagcaaaggatgagacttgc

SEQ ID NO: 1056 - DNA, 23 bp, synthetic construct
  misc_feature 1..23: note = Description of Artificial Sequence: Synthetic primer
  source 1..23: mol_type = other DNA
agagttttccttgggctcaagca

SEQ ID NO: 1057 - DNA, 30 bp, synthetic construct
  misc_feature 1..30: note = Description of Artificial Sequence: Synthetic primer
  source 1..30: mol_type = other DNA
aaaaattgtttttgatcttgtcaaagtccg

SEQ ID NO: 1058 - DNA, 25 bp, synthetic construct
  misc_feature 1..25: note = Description of Artificial Sequence: Synthetic primer
  source 1..25: mol_type = other DNA
gcaagggtacaattcctatccctgg

SEQ ID NO: 1059 - DNA, 23 bp, synthetic construct
  misc_feature 1..23: note = Description of Artificial Sequence: Synthetic primer
  source 1..23: mol_type = other DNA
ccaagggctcctaggttctcttc

SEQ ID NO: 1060 - DNA, 21 bp, synthetic construct
  misc_feature 1..21: note = Description of Artificial Sequence: Synthetic primer
  source 1..21: mol_type = other DNA
ctgaacggccaaccatttcag

SEQ ID NO: 1061 - DNA, 23 bp, synthetic construct
  misc_feature 1..23: note = Description of Artificial Sequence: Synthetic primer
  source 1..23: mol_type = other DNA
catgctggcagaggaagtgagag

SEQ ID NO: 1062 - DNA, 21 bp, synthetic construct
  misc_feature 1..21: note = Description of Artificial Sequence: Synthetic primer
  source 1..21: mol_type = other DNA
taagtttccgttcgatgccgg

SEQ ID NO: 1063 - DNA, 22 bp, synthetic construct
  misc_feature 1..22: note = Description of Artificial Sequence: Synthetic primer
  source 1..22: mol_type = other DNA
tgatcaattctcctcttccggc

SEQ ID NO: 1064 - DNA, 22 bp, synthetic construct
  misc_feature 1..22: note = Description of Artificial Sequence: Synthetic primer
  source 1..22: mol_type = other DNA
tgcaagttgctggttaagtgcc

SEQ ID NO: 1065 - DNA, 27 bp, synthetic construct
  misc_feature 1..27: note = Description of Artificial Sequence: Synthetic primer
  source 1..27: mol_type = other DNA
tcacccgaaagagttaattaaacatgc

SEQ ID NO: 1066 - DNA, 27 bp, synthetic construct
  misc_feature 1..27: note = Description of Artificial Sequence: Synthetic primer
  source 1..27: mol_type = other DNA
tgatgggtgttcaattattgagatgtg

SEQ ID NO: 1067 - DNA, 25 bp, synthetic construct
  misc_feature 1..25: note = Description of Artificial Sequence: Synthetic primer
  source 1..25: mol_type = other DNA
ggcagcttttcatcttaaagtgagc

SEQ ID NO: 1068 - DNA, 19 bp, synthetic construct
  misc_feature 1..19: note = Description of Artificial Sequence: Synthetic primer
  source 1..19: mol_type = other DNA
gccatgtggtgagtgctgc

SEQ ID NO: 1069 - DNA, 27 bp, synthetic construct
  misc_feature 1..27: note = Description of Artificial Sequence: Synthetic primer
  source 1..27: mol_type = other DNA
ttgttacagtaacccttctgcagatcc

SEQ ID NO: 1070 - DNA, 22 bp, synthetic construct
  misc_feature 1..22: note = Description of Artificial Sequence: Synthetic primer
  source 1..22: mol_type = other DNA
ctggggtgggaagtaggggaat

SEQ ID NO: 1071 - DNA, 22 bp, synthetic construct
  misc_feature 1..22: note = Description of Artificial Sequence: Synthetic primer
  source 1..22: mol_type = other DNA
tatggagctccagttcctcccg

SEQ ID NO: 1072 - DNA, 25 bp, synthetic construct
  misc_feature 1..25: note = Description of Artificial Sequence: Synthetic primer
  source 1..25: mol_type = other DNA
aaatctacaaaacgaagcggaactg

SEQ ID NO: 1073 - DNA, 25 bp, synthetic construct
  misc_feature 1..25: note = Description of Artificial Sequence: Synthetic primer
  source 1..25: mol_type = other DNA
cgtcaatttcactccctaagaagcc

SEQ ID NO: 1074 - DNA, 27 bp, synthetic construct
  misc_feature 1..27: note = Description of Artificial Sequence: Synthetic primer
  source 1..27: mol_type = other DNA
ctgttgcattgtaggtctatcatctgg

SEQ ID NO: 1075 - DNA, 30 bp, synthetic construct
  misc_feature 1..30: note = Description of Artificial Sequence: Synthetic primer
  source 1..30: mol_type = other DNA
agaagcaattatagaaatagctgcaagatg

SEQ ID NO: 1076 - DNA, 22 bp, synthetic construct
  misc_feature 1..22: note = Description of Artificial Sequence: Synthetic primer
  source 1..22: mol_type = other DNA
ctgagactcatcagaatccgcc

SEQ ID NO: 1077 - DNA, 20 bp, synthetic construct
  misc_feature 1..20: note = Description of Artificial Sequence: Synthetic primer
  source 1..20: mol_type = other DNA
ccggcgaaggtgatggagac

SEQ ID NO: 1078 - DNA, 21 bp, synthetic construct
  misc_feature 1..21: note = Description of Artificial Sequence: Synthetic primer
  source 1..21: mol_type = other DNA
ctcgtggtgcaaaactcggag

SEQ ID NO: 1079 - DNA, 26 bp, synthetic construct
  misc_feature 1..26: note = Description of Artificial Sequence: Synthetic primer
  source 1..26: mol_type = other DNA
tcaaggagaatctgttgtacgatctc

SEQ ID NO: 1080 - DNA, 24 bp, synthetic construct
  misc_feature 1..24: note = Description of Artificial Sequence: Synthetic primer
  source 1..24: mol_type = other DNA
gctgtgaacattgagacagttgag

SEQ ID NO: 1081 - DNA, 28 bp, synthetic construct
  misc_feature 1..28: note = Description of Artificial Sequence: Synthetic primer
  source 1..28: mol_type = other DNA
ctgagagcacctgataactcactttatg

SEQ ID NO: 1082 - DNA, 29 bp, synthetic construct
  misc_feature 1..29: note = Description of Artificial Sequence: Synthetic primer
  source 1..29: mol_type = other DNA
aagccagaaattgtgattattgattgtgg

SEQ ID NO: 1083 - DNA, 22 bp, synthetic construct
  misc_feature 1..22: note = Description of Artificial Sequence: Synthetic primer
  source 1..22: mol_type = other DNA
ggccctccaattattcccatcc

SEQ ID NO: 1084 - DNA, 20 bp, synthetic construct
  misc_feature 1..20: note = Description of Artificial Sequence: Synthetic primer
  source 1..20: mol_type = other DNA
cggcgaccggagaatcctac

SEQ ID NO: 1085 - DNA, 19 bp, synthetic construct
  misc_feature 1..19: note = Description of Artificial Sequence: Synthetic primer
  source 1..19: mol_type = other DNA
tcgagacactcacggtcgg

SEQ ID NO: 1086 - DNA, 26 bp, synthetic construct
  misc_feature 1..26: note = Description of Artificial Sequence: Synthetic primer
  source 1..26: mol_type = other DNA
agaagcagaagagactatgacaggag

SEQ ID NO: 1087 - DNA, 22 bp, synthetic construct
  misc_feature 1..22: note = Description of Artificial Sequence: Synthetic primer
  source 1..22: mol_type = other DNA
cggctgtggcttctactcctac

SEQ ID NO: 1088 - DNA, 22 bp, synthetic construct
  misc_feature 1..22: note = Description of Artificial Sequence: Synthetic primer
  source 1..22: mol_type = other DNA
ttccctgctcatgatctgcaag

SEQ ID NO: 1089 - DNA, 24 bp, synthetic construct
  misc_feature 1..24: note = Description of Artificial Sequence: Synthetic primer
  source 1..24: mol_type = other DNA
aggatcgtctgaacatccttccac

SEQ ID NO: 1090 - DNA, 25 bp, synthetic construct
  misc_feature 1..25: note = Description of Artificial Sequence: Synthetic primer
  source 1..25: mol_type = other DNA
caccagaaaatcgatctgttctgtg

SEQ ID NO: 1091 - DNA, 21 bp, synthetic construct
  misc_feature 1..21: note = Description of Artificial Sequence: Synthetic primer
  source 1..21: mol_type = other DNA
cgggtgggggtaagtttatcc

SEQ ID NO: 1092 - DNA, 21 bp, synthetic construct
  misc_feature 1..21: note = Description of Artificial Sequence: Synthetic primer
  source 1..21: mol_type = other DNA
cgtgccttcaggaaatgcagc

SEQ ID NO: 1093 - DNA, 22 bp, synthetic construct
  misc_feature 1..22: note = Description of Artificial Sequence: Synthetic primer
  source 1..22: mol_type = other DNA
tgtgcaatgcctgtttcccttc

SEQ ID NO: 1094 - DNA, 30 bp, synthetic construct
  misc_feature 1..30: note = Description of Artificial Sequence: Synthetic primer
  source 1..30: mol_type = other DNA
ccatcttcattcactttattcttccctttg

SEQ ID NO: 1095 - DNA, 24 bp, synthetic construct
  misc_feature 1..24: note = Description of Artificial Sequence: Synthetic primer
  source 1..24: mol_type = other DNA
tcagggtccaaaactgaatgacac

SEQ ID NO: 1096 - DNA, 28 bp, synthetic construct
  misc_feature 1..28: note = Description of Artificial Sequence: Synthetic primer
  source 1..28: mol_type = other DNA
tcttaaaagttgtgagccatcaaatctc

SEQ ID NO: 1097 - DNA, 24 bp, synthetic construct
  misc_feature 1..24: note = Description of Artificial Sequence: Synthetic primer
  source 1..24: mol_type = other DNA
gtagagtccgaaaactacaacccc

SEQ ID NO: 1098 - DNA, 23 bp, synthetic construct
  misc_feature 1..23: note = Description of Artificial Sequence: Synthetic primer
  source 1..23: mol_type = other DNA
tacttcctggacaaccatcaacc

SEQ ID NO: 1099 - DNA, 22 bp, synthetic construct
  misc_feature 1..22: note = Description of Artificial Sequence: Synthetic primer
  source 1..22: mol_type = other DNA
ggtgagggctacacaaaggcag

SEQ ID NO: 1100 - DNA, 19 bp, synthetic construct
  misc_feature 1..19: note = Description of Artificial Sequence: Synthetic primer
  source 1..19: mol_type = other DNA
accacacagatgccgacgg

SEQ ID NO: 1101 - DNA, 22 bp, synthetic construct
  misc_feature 1..22: note = Description of Artificial Sequence: Synthetic primer
  source 1..22: mol_type = other DNA
gcatggacgatgagagcttcag

SEQ ID NO: 1102 - DNA, 27 bp, synthetic construct
  misc_feature 1..27: note = Description of Artificial Sequence: Synthetic primer
  source 1..27: mol_type = other DNA
cagccaaacgataaatattccttcgag

SEQ ID NO: 1103 - DNA, 23 bp, synthetic construct
  misc_feature 1..23: note = Description of Artificial Sequence: Synthetic primer
  source 1..23: mol_type = other DNA
taggttcagatagccagacgagg

SEQ ID NO: 1104 - DNA, 21 bp, synthetic construct
  misc_feature 1..21: note = Description of Artificial Sequence: Synthetic primer
  source 1..21: mol_type = other DNA
cgcactgatggtggcaaattc

SEQ ID NO: 1105 - DNA, 22 bp, synthetic construct
  misc_feature 1..22: note = Description of Artificial Sequence: Synthetic primer
  source 1..22: mol_type = other DNA
tccagtgcccactttggatagc

SEQ ID NO: 1106 - DNA, 26 bp, synthetic construct
  misc_feature 1..26: note = Description of Artificial Sequence: Synthetic primer
  source 1..26: mol_type = other DNA
tttatctttaaattccatgccacccc

SEQ ID NO: 1107 - DNA, 23 bp, synthetic construct
  misc_feature 1..23: note = Description of Artificial Sequence: Synthetic primer
  source 1..23: mol_type = other DNA
gcttcgtcagagaggtacttctg

SEQ ID NO: 1108 - DNA, 25 bp, synthetic construct
  misc_feature 1..25: note = Description of Artificial Sequence: Synthetic primer
  source 1..25: mol_type = other DNA
gccatttgcaatgttttagttggtg

SEQ ID NO: 1109 - DNA, 24 bp, synthetic construct
  misc_feature 1..24: note = Description of Artificial Sequence: Synthetic primer
  source 1..24: mol_type = other DNA
ctgaattagacaacgcatgcttgc

SEQ ID NO: 1110 - DNA, 25 bp, synthetic construct
  misc_feature 1..25: note = Description of Artificial Sequence: Synthetic primer
  source 1..25: mol_type = other DNA
gacatggtcaatatcgatgcatcgc

SEQ ID NO: 1111 - DNA, 28 bp, synthetic construct
  misc_feature 1..28: note = Description of Artificial Sequence: Synthetic primer
  source 1..28: mol_type = other DNA
aaatcataattgaacaatcaccaagggg

SEQ ID NO: 1112 - DNA, 30 bp, synthetic construct
  misc_feature 1..30: note = Description of Artificial Sequence: Synthetic primer
  source 1..30: mol_type = other DNA
agcagacatctttatacaagaaaatgtggc

SEQ ID NO: 1113 - DNA, 31 bp, synthetic construct
  misc_feature 1..31: note = Description of Artificial Sequence: Synthetic primer
  source 1..31: mol_type = other DNA
ttttgttgtgccaatttgttatttatttgac

SEQ ID NO: 1114 - DNA, 22 bp, synthetic construct
  misc_feature 1..22: note = Description of Artificial Sequence: Synthetic primer
  source 1..22: mol_type = other DNA
gccgcatctacataatgcccag

SEQ ID NO: 1115 - DNA, 25 bp, synthetic construct
  misc_feature 1..25: note = Description of Artificial Sequence: Synthetic primer
  source 1..25: mol_type = other DNA
ggttgtggactgacttttaggtttg

SEQ ID NO: 1116 - DNA, 26 bp, synthetic construct
  misc_feature 1..26: note = Description of Artificial Sequence: Synthetic primer
  source 1..26: mol_type = other DNA
gcttcctgctagcattattgagatga

SEQ ID NO: 1117 - DNA, 34 bp, synthetic construct
  misc_feature 1..34: note = Description of Artificial Sequence: Synthetic primer
  source 1..34: mol_type = other DNA
aggtaaatagagttgaagaaaatactatcgacat

SEQ ID NO: 1118 - DNA, 25 bp, synthetic construct
  misc_feature 1..25: note = Description of Artificial Sequence: Synthetic primer
  source 1..25: mol_type = other DNA
cttggaatgactcctcttcatctgg

SEQ ID NO: 1119 - DNA, 31 bp, synthetic construct
  misc_feature 1..31: note = Description of Artificial Sequence: Synthetic primer
  source 1..31: mol_type = other DNA
aagatttctcttcgtgttaagttctctttac

SEQ ID NO: 1120 - DNA, 26 bp, synthetic construct
  misc_feature 1..26: note = Description of Artificial Sequence: Synthetic primer
  source 1..26: mol_type = other DNA
ggagctttcgagtgcttcaattgttc

SEQ ID NO: 1121 - DNA, 22 bp, synthetic construct
  misc_feature 1..22: note = Description of Artificial Sequence: Synthetic primer
  source 1..22: mol_type = other DNA
cagatgggagccagccaataag

SEQ ID NO: 1122 - DNA, 25 bp, synthetic construct
  misc_feature 1..25: note = Description of Artificial Sequence: Synthetic primer
  source 1..25: mol_type = other DNA
tgccacctatgacagtaaagacatg

SEQ ID NO: 1123 - DNA, 25 bp, synthetic construct
  misc_feature 1..25: note = Description of Artificial Sequence: Synthetic primer
  source 1..25: mol_type = other DNA
ctctccaacatctcgaagttgcttc

SEQ ID NO: 1124 - DNA, 27 bp, synthetic construct
  misc_feature 1..27: note = Description of Artificial Sequence: Synthetic primer
  source 1..27: mol_type = other DNA
gagtcaggtattaagaaagtggcaaag

SEQ ID NO: 1125 - DNA, 22 bp, synthetic construct
  misc_feature 1..22: note = Description of Artificial Sequence: Synthetic primer
  source 1..22: mol_type = other DNA
acaactctcagctttaccaggc

SEQ ID NO: 1126 - DNA, 28 bp, synthetic construct
  misc_feature 1..28: note = Description of Artificial Sequence: Synthetic primer
  source 1..28: mol_type = other DNA
actgatggtaaattgagcaagagaatcg

SEQ ID NO: 1127 - DNA, 28 bp, synthetic construct
  misc_feature 1..28: note = Description of Artificial Sequence: Synthetic primer
  source 1..28: mol_type = other DNA
gcaattagcagtctcaatacaaatggag

SEQ ID NO: 1128 - DNA, 34 bp, synthetic construct
  misc_feature 1..34: note = Description of Artificial Sequence: Synthetic primer
  source 1..34: mol_type = other DNA
gggagaaataatattgtgatatatgaagaagagc

SEQ ID NO: 1129 - DNA, 23 bp, synthetic construct
  misc_feature 1..23: note = Description of Artificial Sequence: Synthetic primer
  source 1..23: mol_type = other DNA
ttggttcatctgtgacttccacc

SEQ ID NO: 1130 - DNA, 30 bp, synthetic construct
  misc_feature 1..30: note = Description of Artificial Sequence: Synthetic primer
  source 1..30: mol_type = other DNA
ggaaacaattggagtactttgaacaatatc

SEQ ID NO: 1131 - DNA, 25 bp, synthetic construct
  misc_feature 1..25: note = Description of Artificial Sequence: Synthetic primer
  source 1..25: mol_type = other DNA
gtttgtgctgctccaattaaaccac

SEQ ID NO: 1132 - DNA, 28 bp, synthetic construct
  misc_feature 1..28: note = Description of Artificial Sequence: Synthetic primer
  source 1..28: mol_type = other DNA
tgcatgtctaagcttaagcctaattgac

SEQ ID NO: 1133 - DNA, 22 bp, synthetic construct
  misc_feature 1..22: note = Description of Artificial Sequence: Synthetic primer
  source 1..22: mol_type = other DNA
atatgctgttaccggtgtctgg

SEQ ID NO: 1134 - DNA, 27 bp, synthetic construct
  misc_feature 1..27: note = Description of Artificial Sequence: Synthetic primer
  source 1..27: mol_type = other DNA
gcagcatgtatttaacaaacaaggaac

SEQ ID NO: 1135 - DNA, 25 bp, synthetic construct
  misc_feature 1..25: note = Description of Artificial Sequence: Synthetic primer
  source 1..25: mol_type = other DNA
cagtgacttcatcttgactgacagc

SEQ ID NO: 1136 - DNA, 28 bp, synthetic construct
  misc_feature 1..28: note = Description of Artificial Sequence: Synthetic primer
  source 1..28: mol_type = other DNA
cagatattttgaattcgagctttgttcg

SEQ ID NO: 1137 - DNA, 34 bp, synthetic construct
  misc_feature 1..34: note = Description of Artificial Sequence: Synthetic primer
  source 1..34: mol_type = other DNA
tcatttcaaatatacattagcataaaacgttccc

SEQ ID NO: 1138 - DNA, 21 bp, synthetic construct
  misc_feature 1..21: note = Description of Artificial Sequence: Synthetic primer
  source 1..21: mol_type = other DNA
actagcagcaacagaagcagc

SEQ ID NO: 1139 - DNA, 28 bp, synthetic construct
  misc_feature 1..28: note = Description of Artificial Sequence: Synthetic primer
  source 1..28: mol_type = other DNA
ccttcattcttatggtattttctcagcc

SEQ ID NO: 1140 - DNA, 29 bp, synthetic construct
  misc_feature 1..29: note = Description of Artificial Sequence: Synthetic primer
  source 1..29: mol_type = other DNA
gtctccttgagcactagttctaagtattc

SEQ ID NO: 1141 - DNA, 28 bp, synthetic construct
  misc_feature 1..28: note = Description of Artificial Sequence: Synthetic primer
  source 1..28: mol_type = other DNA
acttgatagaatggttgaggaagatgac

SEQ ID NO: 1142 - DNA, 27 bp, synthetic construct
  misc_feature 1..27: note = Description of Artificial Sequence: Synthetic primer
  source 1..27: mol_type = other DNA
taacactatactagtctttttgccgcc

SEQ ID NO: 1143 - DNA, 27 bp, synthetic construct
  misc_feature 1..27: note = Description of Artificial Sequence: Synthetic primer
  source 1..27: mol_type = other DNA
acccttttcccttttacctgaataaac

SEQ ID NO: 1144 - DNA, 22 bp, synthetic construct
  misc_feature 1..22: note = Description of Artificial Sequence: Synthetic primer
  source 1..22: mol_type = other DNA
cccttgatcgccattgtagacc

SEQ ID NO: 1145 - DNA, 27 bp, synthetic construct
  misc_feature 1..27: note = Description of Artificial Sequence: Synthetic primer
  source 1..27: mol_type = other DNA
ctcagaagtaaaacgtaaagtgagtgg

SEQ ID NO: 1146 - DNA, 27 bp, synthetic construct
  misc_feature 1..27: note = Description of Artificial Sequence: Synthetic primer
  source 1..27: mol_type = other DNA
ttcagaaggttttggaattcactgtag

SEQ ID NO: 1147 - DNA, 21 bp, synthetic construct
  misc_feature 1..21: note = Description of Artificial Sequence: Synthetic primer
  source 1..21: mol_type = other DNA
gaaggggacagagtgggatcc

SEQ ID NO: 1148 - DNA, 28 bp, synthetic construct
  misc_feature 1..28: note = Description of Artificial Sequence: Synthetic primer
  source 1..28: mol_type = other DNA
gtgtgcagaggaagagaaaatagagatg

SEQ ID NO: 1149 - DNA, 24 bp, synthetic construct
  misc_feature 1..24: note = Description of Artificial Sequence: Synthetic primer
  source 1..24: mol_type = other DNA
ggtaagtctcttttggcctacagg

SEQ ID NO: 1150 - DNA, 23 bp, synthetic construct
  misc_feature 1..23: note = Description of Artificial Sequence: Synthetic primer
  source 1..23: mol_type = other DNA
gaaaagaaggtccctccaactgg

SEQ ID NO: 1151 - DNA, 31 bp, synthetic construct
  misc_feature 1..31: note = Description of Artificial Sequence: Synthetic primer
  source 1..31: mol_type = other DNA
tgacattattattgtcacctgagaaatctcc

SEQ ID NO: 1152 - DNA, 33 bp, synthetic construct
  misc_feature 1..33: note = Description of Artificial Sequence: Synthetic primer
  source 1..33: mol_type = other DNA
cctttaccactattataaagaaaaaggacaacc

SEQ ID NO: 1153 - DNA, 22 bp, synthetic construct
  misc_feature 1..22: note = Description of Artificial Sequence: Synthetic primer
  source 1..22: mol_type = other DNA
gaccatgcgtgaacatgtgatg

SEQ ID NO: 1154 - DNA, 25 bp, synthetic construct
  misc_feature 1..25: note = Description of Artificial Sequence: Synthetic primer
  source 1..25: mol_type = other DNA
tgaagtaggagcaatgttggtgatg

SEQ ID NO: 1155 - DNA, 28 bp, synthetic construct
  misc_feature 1..28: note = Description of Artificial Sequence: Synthetic primer
  source 1..28: mol_type = other DNA
catttttcttaggaggaagtaggctaac

SEQ ID NO: 1156 - DNA, 35 bp, synthetic construct
  misc_feature 1..35: note = Description of Artificial Sequence: Synthetic primer
  source 1..35: mol_type = other DNA
tgttcattttaagatgaataaagaattaagtctgc

SEQ ID NO: 1157 - DNA, 25 bp, synthetic construct
  misc_feature 1..25: note = Description of Artificial Sequence: Synthetic primer
  source 1..25: mol_type = other DNA
aatgagttccaagggtagtggtttg

SEQ ID NO: 1158 - DNA, 29 bp, synthetic construct
  misc_feature 1..29: note = Description of Artificial Sequence: Synthetic primer
  source 1..29: mol_type = other DNA
aagtactatctgctgcaagttgttttttc

SEQ ID NO: 1159 - DNA, 34 bp, synthetic construct
  misc_feature 1..34: note = Description of Artificial Sequence: Synthetic primer
  source 1..34: mol_type = other DNA
tatggttttttgtgttctaaataaacttgatctg

SEQ ID NO: 1160 - DNA, 21 bp, synthetic construct
  misc_feature 1..21: note = Description of Artificial Sequence: Synthetic primer
  source 1..21: mol_type = other DNA
cgtgcaatcctctggagaagc

SEQ ID NO: 1161 - DNA, 23 bp, synthetic construct
  misc_feature 1..23: note = Description of Artificial Sequence: Synthetic primer
  source 1..23: mol_type = other DNA
gttggtctgctttttgttgcgac

SEQ ID NO: 1162 - DNA, 26 bp, synthetic construct
  misc_feature 1..26: note = Description of Artificial Sequence: Synthetic primer
  source 1..26: mol_type = other DNA
tggtgcctttatacttgctgtgtatg

SEQ ID NO: 1163 - DNA, 29 bp, synthetic construct
  misc_feature 1..29: note = Description of Artificial Sequence: Synthetic primer
  source 1..29: mol_type = other DNA
agtaacaagaactgtaactaacgtaggac

SEQ ID NO: 1164 - DNA, 30 bp, synthetic construct
  misc_feature 1..30: note = Description of Artificial Sequence: Synthetic primer
  source 1..30: mol_type = other DNA
ttgctctgaaaaacaaaatatggagtgatg

SEQ ID NO: 1165 - DNA, 23 bp, synthetic construct
  misc_feature 1..23: note = Description of Artificial Sequence: Synthetic primer
  source 1..23: mol_type = other DNA
ttggatggggtggagtttacttg

SEQ ID NO: 1166 - DNA, 22 bp, synthetic construct
  misc_feature 1..22: note = Description of Artificial Sequence: Synthetic primer
  source 1..22: mol_type = other DNA
ttcgagtgattttgggcgttcc

SEQ ID NO: 1167 - DNA, 25 bp, synthetic construct
  misc_feature 1..25: note = Description of Artificial Sequence: Synthetic primer
  source 1..25: mol_type = other DNA
tgcattggtcagatcaaacagagga

SEQ ID NO: 1168 - DNA, 23 bp, synthetic construct
  misc_feature 1..23: note = Description of Artificial Sequence: Synthetic primer
  source 1..23: mol_type = other DNA
tccatttcagatagtgtgctggc

SEQ ID NO: 1169 - DNA, 26 bp, synthetic construct
  misc_feature 1..26: note = Description of Artificial Sequence: Synthetic primer
  source 1..26: mol_type = other DNA
atgcacaaatcaaattttcaaggcag

SEQ ID NO: 1170 - DNA, 26 bp, synthetic construct
  misc_feature 1..26: note = Description of Artificial Sequence: Synthetic primer
  source 1..26: mol_type = other DNA
ttcagctaaatctctggccaaagttg

SEQ ID NO: 1171 - DNA, 22 bp, synthetic construct
  misc_feature 1..22: note = Description of Artificial Sequence: Synthetic primer
  source 1..22: mol_type = other DNA
gagatcggaaggagcaaaggag

SEQ ID NO: 1172 - DNA, 28 bp, synthetic construct
  misc_feature 1..28: note = Description of Artificial Sequence: Synthetic primer
  source 1..28: mol_type = other DNA
tgatttttggagctcagaagaaagaaga

SEQ ID NO: 1173 - DNA, 25 bp, synthetic construct
  misc_feature 1..25: note = Description of Artificial Sequence: Synthetic primer
  source 1..25: mol_type = other DNA
tctagaaggaaaaggaatcgaccct

SEQ ID NO: 1174 - DNA, 25 bp, synthetic construct
  misc_feature 1..25: note = Description of Artificial Sequence: Synthetic primer
  source 1..25: mol_type = other DNA
gttctctgatttgagccatgatgag

SEQ ID NO: 1175 - DNA, 25 bp, synthetic construct
  misc_feature 1..25: note = Description of Artificial Sequence: Synthetic primer
  source 1..25: mol_type = other DNA
gcaactcttgatcaactttcagtcc

SEQ ID NO: 1176 - DNA, 23 bp, synthetic construct
  misc_feature 1..23: note = Description of Artificial Sequence: Synthetic primer
  source 1..23: mol_type = other DNA
caagcaggtgcagctgcttttag

SEQ ID NO: 1177 - DNA, 25 bp, synthetic construct
  misc_feature 1..25: note = Description of Artificial Sequence: Synthetic primer
  source 1..25: mol_type = other DNA
tcacaaccagtcaatgaaagagggg

SEQ ID NO: 1178 - DNA, 26 bp, synthetic construct
  misc_feature 1..26: note = Description of Artificial Sequence: Synthetic primer
  source 1..26: mol_type = other DNA
aggatcgtacgtgtatggttcaaagg

SEQ ID NO: 1179 - DNA, 22 bp, synthetic construct
  misc_feature 1..22: note = Description of Artificial Sequence: Synthetic primer
  source 1..22: mol_type = other DNA
agcccgtcgtccagttattttc

SEQ ID NO: 1180 - DNA, 27 bp, synthetic construct
  misc_feature 1..27: note = Description of Artificial Sequence: Synthetic primer
  source 1..27: mol_type = other DNA
ggacgaagaatgctcaaaacaataagg

SEQ ID NO: 1181 - DNA, 22 bp, synthetic construct
  misc_feature 1..22: note = Description of Artificial Sequence: Synthetic primer
  source 1..22: mol_type = other DNA
acgcttggaactgaaaagatgc

SEQ ID NO: 1182 - DNA, 26 bp, synthetic construct
  misc_feature 1..26: note = Description of Artificial Sequence: Synthetic primer
  source 1..26: mol_type = other DNA
acgatagaacagaaaacattgcactg

SEQ ID NO: 1183 - DNA, 26 bp, synthetic construct
  misc_feature 1..26: note = Description of Artificial Sequence: Synthetic primer
  source 1..26: mol_type = other DNA
gttgcagagaagattgctgattttgg

SEQ ID NO: 1184 - DNA, 21 bp, synthetic construct
  misc_feature 1..21: note = Description of Artificial Sequence: Synthetic primer
  source 1..21: mol_type = other DNA
gttgtgtgggcaaaggcagag

SEQ ID NO: 1185 - DNA, 24 bp, synthetic construct
  misc_feature 1..24: note = Description of Artificial Sequence: Synthetic primer
  source 1..24: mol_type = other DNA
gaacttgttgtcttgtacgcgtag

SEQ ID NO: 1186 - DNA, 22 bp, synthetic construct
  misc_feature 1..22: note = Description of Artificial Sequence: Synthetic primer
  source 1..22: mol_type = other DNA
ctcctacaccgccctatcctac

SEQ ID NO: 1187 - DNA, 26 bp, synthetic construct
  misc_feature 1..26: note = Description of Artificial Sequence: Synthetic primer
  source 1..26: mol_type = other DNA
agttggagacagtgagactcagattg

SEQ ID NO: 1188 - DNA, 27 bp, synthetic construct
  misc_feature 1..27: note = Description of Artificial Sequence: Synthetic primer
  source 1..27: mol_type = other DNA
tccataacccattgtgttcaattggac

SEQ ID NO: 1189 - DNA, 24 bp, synthetic construct
  misc_feature 1..24: note = Description of Artificial Sequence: Synthetic primer
  source 1..24: mol_type = other DNA
tctaatcgaaagctctggcgattc

SEQ ID NO: 1190 - DNA, 31 bp, synthetic construct
  misc_feature 1..31: note = Description of Artificial Sequence: Synthetic primer
  source 1..31: mol_type = other DNA
gaagttgaagcaatatctttcgagaatgatg

SEQ ID NO: 1191 - DNA, 27 bp, synthetic construct
  misc_feature 1..27: note = Description of Artificial Sequence: Synthetic primer
  source 1..27: mol_type = other DNA
gataagtgatccaacgacagaactttc

SEQ ID NO: 1192 - DNA, 25 bp, synthetic construct
  misc_feature 1..25: note = Description of Artificial Sequence: Synthetic primer
  source 1..25: mol_type = other DNA
aatcctcatcgatccgatcaaatcg

SEQ ID NO: 1193 - DNA, 23 bp, synthetic construct
  misc_feature 1..23: note = Description of Artificial Sequence: Synthetic primer
  source 1..23: mol_type = other DNA
ccgcacggaaatagagatgttcg

SEQ ID NO: 1194 - DNA, 28 bp, synthetic construct
  misc_feature 1..28: note = Description of Artificial Sequence: Synthetic primer
  source 1..28: mol_type = other DNA
gctgaagcaaggaaaaaatcgaaaattc

SEQ ID NO: 1195 - DNA, 32 bp, synthetic construct
  misc_feature 1..32: note = Description of Artificial Sequence: Synthetic primer
  source 1..32: mol_type = other DNA
tttcaagaatgtaaggttctttgtttctcacc

SEQ ID NO: 1196 - DNA, 31 bp, synthetic construct
  misc_feature 1..31: note = Description of Artificial Sequence: Synthetic primer
  source 1..31: mol_type = other DNA
agtttgcatattttcgtccatgtttttaatc

SEQ ID NO: 1197 - DNA, 30 bp, synthetic construct
  misc_feature 1..30: note = Description of Artificial Sequence: Synthetic primer
  source 1..30: mol_type = other DNA
aaccaatgattgcatagaaagtcatatcac

SEQ ID NO: 1198 - DNA, 26 bp, synthetic construct
  misc_feature 1..26: note = Description of Artificial Sequence: Synthetic primer
  source 1..26: mol_type = other DNA
gtgggtagctgaagggtttgtacaag

SEQ ID NO: 1199 - DNA, 24 bp, synthetic construct
  misc_feature 1..24: note = Description of Artificial Sequence: Synthetic primer
  source 1..24: mol_type = other DNA
caagaaaccttgtgcggtatcttc

SEQ ID NO: 1200 - DNA, 26 bp, synthetic construct
  misc_feature 1..26: note = Description of Artificial Sequence: Synthetic primer
  source 1..26: mol_type = other DNA
gcctatatttcctctcactactgtgc

SEQ ID NO: 1201 - DNA, 25 bp, synthetic construct
  misc_feature 1..25: note = Description of Artificial Sequence: Synthetic primer
  source 1..25: mol_type = other DNA
ggaatatctaagacaatgcccgagc

SEQ ID NO: 1202 - DNA, 27 bp, synthetic construct
  misc_feature 1..27: note = Description of Artificial Sequence: Synthetic primer
  source 1..27: mol_type = other DNA
gaaaagtctacttccacttctcctgtg

SEQ ID NO: 1203 - DNA, 27 bp, synthetic construct
  misc_feature 1..27: note = Description of Artificial Sequence: Synthetic primer
  source 1..27: mol_type = other DNA
catcctcatcatctgacgcatagttag

SEQ ID NO: 1204 - DNA, 23 bp, synthetic construct
  misc_feature 1..23: note = Description of Artificial Sequence: Synthetic primer
  source 1..23: mol_type = other DNA
tccaccatagaagccccaaatcc

SEQ ID NO: 1205 - DNA, 28 bp, synthetic construct
  misc_feature 1..28: note = Description of Artificial Sequence: Synthetic primer
  source 1..28: mol_type = other DNA
ggattgttaatgaagagaagcatagggg

SEQ ID NO: 1206 - DNA, 23 bp, synthetic construct
  misc_feature 1..23: note = Description of Artificial Sequence: Synthetic primer
  source 1..23: mol_type = other DNA
tcagcattttcaaatctggtggc

SEQ ID NO: 1207 - DNA, 24 bp, synthetic construct
  misc_feature 1..24: note = Description of Artificial Sequence: Synthetic primer
  source 1..24: mol_type = other DNA
aggttaaccccttggatgatctcc

SEQ ID NO: 1208 - DNA, 26 bp, synthetic construct
  misc_feature 1..26: note = Description of Artificial Sequence: Synthetic primer
  source 1..26: mol_type = other DNA
gcttccaaactatgtcgtctatcatg

SEQ ID NO: 1209 - DNA, 25 bp, synthetic construct
  misc_feature 1..25: note = Description of Artificial Sequence: Synthetic primer
  source 1..25: mol_type = other DNA
catctcaactgcacatacattacgc

SEQ ID NO: 1210 - DNA, 24 bp, synthetic construct
  misc_feature 1..24: note = Description of Artificial Sequence: Synthetic primer
  source 1..24: mol_type = other DNA
ccctggtaatacagcaagtacgac

SEQ ID NO: 1211 - DNA, 26 bp, synthetic construct
  misc_feature 1..26: note = Description of Artificial Sequence: Synthetic primer
  source 1..26: mol_type = other DNA
ggtagctattacttgcatcatgccag

SEQ ID NO: 1212 - DNA, 26 bp, synthetic construct
  misc_feature 1..26: note = Description of Artificial Sequence: Synthetic primer
  source 1..26: mol_type = other DNA
tcaatcgattcgggaatatctgcttg

SEQ ID NO: 1213 - DNA, 23 bp, synthetic construct
  misc_feature 1..23: note = Description of Artificial Sequence: Synthetic primer
  source 1..23: mol_type = other DNA
aagcagcgcagaaagagaatacc

SEQ ID NO: 1214 - DNA, 29 bp, synthetic construct
  misc_feature 1..29: note = Description of Artificial Sequence: Synthetic primer
  source 1..29: mol_type = other DNA
gagacgagtgagatttcaaattacaagtc

SEQ ID NO: 1215 - DNA, 27 bp, synthetic construct
  misc_feature 1..27: note = Description of Artificial Sequence: Synthetic primer
  source 1..27: mol_type = other DNA
catgttgttcgttactagccaacttag

SEQ ID NO: 1216 - DNA, 24 bp, synthetic construct
  misc_feature 1..24: note = Description of Artificial Sequence: Synthetic primer
  source 1..24: mol_type = other DNA
tggagaaaacaagaggtggtaagg

SEQ ID NO: 1217 - DNA, 23 bp, synthetic construct
  misc_feature 1..23: note = Description of Artificial Sequence: Synthetic primer
  source 1..23: mol_type = other DNA
gctccaccagccattactacacg

SEQ ID NO: 1218 - DNA, 25 bp, synthetic construct
  misc_feature 1..25: note = Description of Artificial Sequence: Synthetic primer
  source 1..25: mol_type = other DNA
atgcacttccttcatcacattgttg

SEQ ID NO: 1219 - DNA, 30 bp, synthetic construct
  misc_feature 1..30: note = Description of Artificial Sequence: Synthetic primer
  source 1..30: mol_type = other DNA
ggcttttcttcgaaaatgttgcattaatcc

SEQ ID NO: 1220 - DNA, 24 bp, synthetic construct
  misc_feature 1..24: note = Description of Artificial Sequence: Synthetic primer
  source 1..24: mol_type = other DNA
ttgtggtctcagcaatcatggatg

SEQ ID NO: 1221 - DNA, 19 bp, synthetic construct
  misc_feature 1..19: note = Description of Artificial Sequence: Synthetic primer
  source 1..19: mol_type = other DNA
aggcctgcttcgaacatgg

SEQ ID NO: 1222 - DNA, 26 bp, synthetic construct
  misc_feature 1..26: note = Description of Artificial Sequence: Synthetic primer
  source 1..26: mol_type = other DNA
gaaaagggttcatgaactagaagctg

SEQ ID NO: 1223 - DNA, 27 bp, synthetic construct
  misc_feature 1..27: note = Description of Artificial Sequence: Synthetic primer
  source 1..27: mol_type = other DNA
atcgaatattttggactccgttaatcg

SEQ ID NO: 1224 - DNA, 25 bp, synthetic construct
  misc_feature 1..25: note = Description of Artificial Sequence: Synthetic primer
  source 1..25: mol_type = other DNA
tggtcttgtttgtttggcccaatag

SEQ ID NO: 1225 - DNA, 26 bp, synthetic construct
  misc_feature 1..26: note = Description of Artificial Sequence: Synthetic primer
  source 1..26: mol_type = other DNA
agaagaagaaaaaaccccgaatctcc

SEQ ID NO: 1226 - DNA, 28 bp, synthetic construct
  misc_feature 1..28: note = Description of Artificial Sequence: Synthetic primer
  source 1..28: mol_type = other DNA
ggagtgcaatctcataatagtgctcctg

SEQ ID NO: 1227 - DNA, 20 bp, synthetic construct
  misc_feature 1..20: note = Description of Artificial Sequence: Synthetic primer
  source 1..20: mol_type = other DNA
agcgacggaattgccatagg

SEQ ID NO: 1228 - DNA, 29 bp, synthetic construct
  misc_feature 1..29: note = Description of Artificial Sequence: Synthetic primer
  source 1..29: mol_type = other DNA
tttaactgaaaaatggggagatttaccac

SEQ ID NO: 1229 - DNA, 31 bp, synthetic construct
  misc_feature 1..31: note = Description of Artificial Sequence: Synthetic primer
  source 1..31: mol_type = other DNA
tttaatagaccgtaaattaccatatcttcgg

SEQ ID NO: 1230 - DNA, 25 bp, synthetic construct
  misc_feature 1..25: note = Description of Artificial Sequence: Synthetic primer
  source 1..25: mol_type = other DNA
tgtgtgtacagtaaaacctctggtc

SEQ ID NO: 1231 - DNA, 25 bp, synthetic construct
  misc_feature 1..25: note = Description of Artificial Sequence: Synthetic primer
  source 1..25: mol_type = other DNA
gagtccatttcaaagcttgtactgc

SEQ ID NO: 1232 - DNA, 28 bp, synthetic construct
  misc_feature 1..28: note = Description of Artificial Sequence: Synthetic primer
  source 1..28: mol_type = other DNA
ttcagatgaaatttatgatgcatgggtg

SEQ ID NO: 1233 - DNA, 33 bp, synthetic construct
  misc_feature 1..33: note = Description of Artificial Sequence: Synthetic primer
  source 1..33: mol_type = other DNA
gcaaatactcgtaaacatactaatcaattcaac

SEQ ID NO: 1234 - DNA, 26 bp, synthetic construct
  misc_feature 1..26: note = Description of Artificial Sequence: Synthetic primer
  source 1..26: mol_type = other DNA
aagttgccttgacctaataatctccc

SEQ ID NO: 1235 - DNA, 28 bp, synthetic construct
  misc_feature 1..28: note = Description of Artificial Sequence: Synthetic primer
  source 1..28: mol_type = other DNA
atggagaaaaaaggaaatgtactgatgg

SEQ ID NO: 1236 - DNA, 28 bp, synthetic construct
  misc_feature 1..28: note = Description of Artificial Sequence: Synthetic primer
  source 1..28: mol_type = other DNA
ctcaataacaggaaatcacacctaatcc

SEQ ID NO: 1237 - DNA, 29 bp, synthetic construct
  misc_feature 1..29: note = Description of Artificial Sequence: Synthetic primer
  source 1..29: mol_type = other DNA
tgtggttgctattattccgtagatacatc

SEQ ID NO: 1238 - DNA, 22 bp, synthetic construct
  misc_feature 1..22: note = Description of Artificial Sequence: Synthetic primer
  source 1..22: mol_type = other DNA
tcgccatctcccttagcacatg

SEQ ID NO: 1239 - DNA, 25 bp, synthetic construct
  misc_feature 1..25: note = Description of Artificial Sequence: Synthetic primer
  source 1..25: mol_type = other DNA
ttgagcgggtgttcagtaattaatg

SEQ ID NO: 1240 - DNA, 27 bp, synthetic construct
  misc_feature 1..27: note = Description of Artificial Sequence: Synthetic primer
  source 1..27: mol_type = other DNA
taccgatgatgaaaacactctagctag

SEQ ID NO: 1241 - DNA, 26 bp, synthetic construct
  misc_feature 1..26: note = Description of Artificial Sequence: Synthetic primer
  source 1..26: mol_type = other DNA
aatcaacaatggacatcaaatacccc

SEQ ID NO: 1242 - DNA, 19 bp, synthetic construct
  misc_feature 1..19: note = Description of Artificial Sequence: Synthetic primer
  source 1..19: mol_type = other DNA
gaggcctttccgtgctctc

SEQ ID NO: 1243 - DNA, 27 bp, synthetic construct
  misc_feature 1..27: note = Description of Artificial Sequence: Synthetic primer
  source 1..27: mol_type = other DNA
acggttccctgtagtagttcttaagag

SEQ ID NO: 1244 - DNA, 27 bp, synthetic construct
  misc_feature 1..27: note = Description of Artificial Sequence: Synthetic primer
  source 1..27: mol_type = other DNA
tgtgaaaggcatcatatgttagctctc

SEQ ID NO: 1245 - DNA, 25 bp, synthetic construct
  misc_feature 1..25: note = Description of Artificial Sequence: Synthetic primer
  source 1..25: mol_type = other DNA
acaagttcaaggcggtgaaattatc

SEQ ID NO: 1246 - DNA, 24 bp, synthetic construct
  misc_feature 1..24: note = Description of Artificial Sequence: Synthetic primer
  source 1..24: mol_type = other DNA
tcagggtctgagtaatttgagagc

SEQ ID NO: 1247 - DNA, 28 bp, synthetic construct
  misc_feature 1..28: note = Description of Artificial Sequence: Synthetic primer
  source 1..28: mol_type = other DNA
gaatttcacccatgaacttatttctccc

SEQ ID NO: 1248 - DNA, 32 bp, synthetic construct
  misc_feature 1..32: note = Description of Artificial Sequence: Synthetic primer
  source 1..32: mol_type = other DNA
ggaacaaattaagtaagatcatcttcctcaag

SEQ ID NO: 1249 - DNA, 28 bp, synthetic construct
  misc_feature 1..28: note = Description of Artificial Sequence: Synthetic primer
  source 1..28: mol_type = other DNA
aggacaacactacttctaagagtcaagg

SEQ ID NO: 1250 - DNA, 22 bp, synthetic construct
  misc_feature 1..22: note = Description of Artificial Sequence: Synthetic primer
  source 1..22: mol_type = other DNA
atgcccttgtgagatgggtgtg

SEQ ID NO: 1251 - DNA, 23 bp, synthetic construct
  misc_feature 1..23: note = Description of Artificial Sequence: Synthetic primer
  source 1..23: mol_type = other DNA
caacctatgcccttgaacatgtg

SEQ ID NO: 1252 - DNA, 24 bp, synthetic construct
  misc_feature 1..24: note = Description of Artificial Sequence: Synthetic primer
  source 1..24: mol_type = other DNA
acacaattcaaaatcccctcctcc

SEQ ID NO: 1253 - DNA, 22 bp, synthetic construct
  misc_feature 1..22: note = Description of Artificial Sequence: Synthetic primer
  source 1..22: mol_type = other DNA
cgtacggctgcagagttcaaag

SEQ ID NO: 1254 - DNA, 21 bp, synthetic construct
  misc_feature 1..21: note = Description of Artificial Sequence: Synthetic primer
  source 1..21: mol_type = other DNA
gcagaagacctcccaccagag

SEQ ID NO: 1255 - DNA, 26 bp, synthetic construct
  misc_feature 1..26: note = Description of Artificial Sequence: Synthetic primer
  source 1..26: mol_type = other DNA
atccctgagaagaaatggtacctaag

SEQ ID NO: 1256 - DNA, 22 bp, synthetic construct
  misc_feature 1..22: note = Description of Artificial Sequence: Synthetic primer
  source 1..22: mol_type = other DNA
ttgggagaaaatacccctgctg

SEQ ID NO: 1257 - DNA, 27 bp, synthetic construct
  misc_feature 1..27: note = Description of Artificial Sequence: Synthetic primer
  source 1..27: mol_type = other DNA
tgaatgttttcgccatttctcttgtac

SEQ ID NO: 1258 - DNA, 26 bp, synthetic construct
  misc_feature 1..26: note = Description of Artificial Sequence: Synthetic primer
  source 1..26: mol_type = other DNA
tgaccatctgagtgtgagaaatatgc

SEQ ID NO: 1259 - DNA, 21 bp, synthetic construct
  misc_feature 1..21: note = Description of Artificial Sequence: Synthetic primer
  source 1..21: mol_type = other DNA
agcactctgataggcctgctg

SEQ ID NO: 1260 - DNA, 26 bp, synthetic construct
  misc_feature 1..26: note = Description of Artificial Sequence: Synthetic primer
  source 1..26: mol_type = other DNA
gacaaggtttcatgtctgttgagttg

SEQ ID NO: 1261 - DNA, 32 bp, synthetic construct
  misc_feature 1..32: note = Description of Artificial Sequence: Synthetic primer
  source 1..32: mol_type = other DNA
ctaccaaaaacatcataatatttgatctcagc

SEQ ID NO: 1262 - DNA, 24 bp, synthetic construct
  misc_feature 1..24: note = Description of Artificial Sequence: Synthetic primer
  source 1..24: mol_type = other DNA
gctatattttgaggcctgttggac

SEQ ID NO: 1263 - DNA, 29 bp, synthetic construct
  misc_feature 1..29: note = Description of Artificial Sequence: Synthetic primer
  source 1..29: mol_type = other DNA
aaacacaaattcttgaggcaatacatgac

SEQ ID NO: 1264 - DNA, 28 bp, synthetic construct
  misc_feature 1..28: note = Description of Artificial Sequence: Synthetic primer
  source 1..28: mol_type = other DNA
taaaatatatggcgactggattgatgac

SEQ ID NO: 1265 - DNA, 29 bp, synthetic construct
  misc_feature 1..29: note = Description of Artificial Sequence: Synthetic primer
  source 1..29: mol_type = other DNA
acagatcagtagctaattatgacaactcc

SEQ ID NO: 1266 - DNA, 22 bp, synthetic construct
  misc_feature 1..22: note = Description of Artificial Sequence: Synthetic primer
  source 1..22: mol_type = other DNA
gggcaagaatcggtcggaaatg

SEQ ID NO: 1267 - DNA, 24 bp, synthetic construct
  misc_feature 1..24: note = Description of Artificial Sequence: Synthetic primer
  source 1..24: mol_type = other DNA
ccactaccttctcatcaagacgac

SEQ ID NO: 1268 - DNA, 27 bp, synthetic construct
  misc_feature 1..27: note = Description of Artificial Sequence: Synthetic primer
  source 1..27: mol_type = other DNA
ctaggaagagagttgaaaagacctagc

SEQ ID NO: 1269 - DNA, 31 bp, synthetic construct
  misc_feature 1..31: note = Description of Artificial Sequence: Synthetic primer
  source 1..31: mol_type = other DNA
aaaaacttataccttatttatcatctccccc

SEQ ID NO: 1270 - DNA, 25 bp, synthetic construct
  misc_feature 1..25: note = Description of Artificial Sequence: Synthetic primer
  source 1..25: mol_type = other DNA
catctgcagaagaattgttgtccag

SEQ ID NO: 1271 - DNA, 22 bp, synthetic construct
  misc_feature 1..22: note = Description of Artificial Sequence: Synthetic primer
  source 1..22: mol_type = other DNA
ggccataaagattctgccaacc

SEQ ID NO: 1272 - DNA, 28 bp, synthetic construct
  misc_feature 1..28: note = Description of Artificial Sequence: Synthetic primer
  source 1..28: mol_type = other DNA
tgtctcctttgtttcaagtggtatcatg

SEQ ID NO: 1273 - DNA, 27 bp, synthetic construct
  misc_feature 1..27: note = Description of Artificial Sequence: Synthetic primer
  source 1..27: mol_type = other DNA
tgtttcgattgatttctcctcaacttc

SEQ ID NO: 1274 - DNA, 22 bp, synthetic construct
  misc_feature 1..22: note = Description of Artificial Sequence: Synthetic primer
  source 1..22: mol_type = other DNA
tagttgtctgccgacttcctgg

SEQ ID NO: 1275 - DNA, 30 bp, synthetic construct
  misc_feature 1..30: note = Description of Artificial Sequence: Synthetic primer
  source 1..30: mol_type = other DNA
ctcaggaacttctctaaagaacgtatcttg

SEQ ID NO: 1276 - DNA, 24 bp, synthetic construct
  misc_feature 1..24: note = Description of Artificial Sequence: Synthetic primer
  source 1..24: mol_type = other DNA
agaaagtgtgactccaacaaagcg

SEQ ID NO: 1277 - DNA, 25 bp, synthetic construct
  misc_feature 1..25: note = Description of Artificial Sequence: Synthetic primer
  source 1..25: mol_type = other DNA
tctttcacgtccttcttagaagctg

SEQ ID NO: 1278 - DNA, 28 bp, synthetic construct
  misc_feature 1..28: note = Description of Artificial Sequence: Synthetic primer
  source 1..28: mol_type = other DNA
cgaatgcatataaagcttttgatccaag

SEQ ID NO: 1279 - DNA, 20 bp, synthetic construct
  misc_feature 1..20: note = Description of Artificial Sequence: Synthetic primer
  source 1..20: mol_type = other DNA
tagtgcggggaaggaccaag

SEQ ID NO: 1280 - DNA, 22 bp, synthetic construct
  misc_feature 1..22: note = Description of Artificial Sequence: Synthetic primer
  source 1..22: mol_type = other DNA
cagaaggaatcaactcgggggt

SEQ ID NO: 1281 - DNA, 22 bp, synthetic construct
  misc_feature 1..22: note = Description of Artificial Sequence: Synthetic primer
  source 1..22: mol_type = other DNA
taacagcctagctaaccaccac

SEQ ID NO: 1282 - DNA, 27 bp, synthetic construct
  misc_feature 1..27: note = Description of Artificial Sequence: Synthetic primer
  source 1..27: mol_type = other DNA
ttcaagtggtgaagttcacatagtgtg

SEQ ID NO: 1283 - DNA, 35 bp, synthetic construct
  misc_feature 1..35: note = Description of Artificial Sequence: Synthetic primer
  source 1..35: mol_type = other DNA
aaaattaagtaatgcatgtagcatgaataaaagtg

SEQ ID NO: 1284 - DNA, 22 bp, synthetic construct
  misc_feature 1..22: note = Description of Artificial Sequence: Synthetic primer
  source 1..22: mol_type = other DNA
acaaagttcccagaacctccac

SEQ ID NO: 1285 - DNA, 29 bp, synthetic construct
  misc_feature 1..29: note = Description of Artificial Sequence: Synthetic primer
  source 1..29: mol_type = other DNA
tagttatttcttcaacttcgacttctgtg

SEQ ID NO: 1286 - DNA, 24 bp, synthetic construct
  misc_feature 1..24: note = Description of Artificial Sequence: Synthetic primer
  source 1..24: mol_type = other DNA
ctgcaaccgaagctattgactgtg

SEQ ID NO: 1287 - DNA, 24 bp, synthetic construct
  misc_feature 1..24: note = Description of Artificial Sequence: Synthetic primer
  source 1..24: mol_type = other DNA
cgaagagggaggaggtcattgatc

SEQ ID NO: 1288 - DNA, 29 bp, synthetic construct
  misc_feature 1..29: note = Description of Artificial Sequence: Synthetic primer
  source 1..29: mol_type = other DNA
gctgtttcgactgatactattaatggtgg

SEQ ID NO: 1289 - DNA, 27 bp, synthetic construct
  misc_feature 1..27: note = Description of Artificial Sequence: Synthetic primer
  source 1..27: mol_type = other DNA
tgacattaagtcgaagactctgatcga

SEQ ID NO: 1290 - DNA, 27 bp, synthetic construct
  misc_feature 1..27: note = Description of Artificial Sequence: Synthetic primer
  source 1..27: mol_type = other DNA
gaacagggaagtgtcaaatcaattggg

SEQ ID NO: 1291 - DNA, 17 bp, synthetic construct
  misc_feature 1..17: note = Description of Artificial Sequence: Synthetic primer
  source 1..17: mol_type = other DNA
tgcagcctgggcagttg

SEQ ID NO: 1292 - DNA, 24 bp, synthetic construct
  misc_feature 1..24: note = Description of Artificial Sequence: Synthetic primer
  source 1..24: mol_type = other DNA
ttcgaagcggttagtcacagtaag

SEQ ID NO: 1293 - DNA, 18 bp, synthetic construct
  misc_feature 1..18: note = Description of Artificial Sequence: Synthetic primer
  source 1..18: mol_type = other DNA
aaccgctttacccaccgc

SEQ ID NO: 1294 - DNA, 21 bp, synthetic construct
  misc_feature 1..21: note = Description of Artificial Sequence: Synthetic primer
  source 1..21: mol_type = other DNA
gaagggtggtggtgatttggc

SEQ ID NO: 1295 - DNA, 29 bp, synthetic construct
  misc_feature 1..29: note = Description of Artificial Sequence: Synthetic primer
  source 1..29: mol_type = other DNA
acatcaaacggaacatatctatcttttcc

SEQ ID NO: 1296 - DNA, 20 bp, synthetic construct
  misc_feature 1..20: note = Description of Artificial Sequence: Synthetic primer
  source 1..20: mol_type = other DNA
gtgggtgtgacattggggcc

SEQ ID NO: 1297 - DNA, 22 bp, synthetic construct
  misc_feature 1..22: note = Description of Artificial Sequence: Synthetic primer
  source 1..22: mol_type = other DNA
caccaagagcacgtagaccatg

SEQ ID NO: 1298 - DNA, 23 bp, synthetic construct
  misc_feature 1..23: note = Description of Artificial Sequence: Synthetic primer
  source 1..23: mol_type = other DNA
ttggaccaacttgcattttcggg

SEQ ID NO: 1299 - DNA, 27 bp, synthetic construct
  misc_feature 1..27: note = Description of Artificial Sequence: Synthetic primer
  source 1..27: mol_type = other DNA
cacctaagcaagtttcagaaaaggttg

SEQ ID NO: 1300 - DNA, 25 bp, synthetic construct
  misc_feature 1..25: note = Description of Artificial Sequence: Synthetic primer
  source 1..25: mol_type = other DNA
gtgatttctggtgaacctgatccag

SEQ ID NO: 1301 - DNA, 24 bp, synthetic construct
  misc_feature 1..24: note = Description of Artificial Sequence: Synthetic primer
  source 1..24: mol_type = other DNA
tttgtctgacttgattggtgcaac

SEQ ID NO: 1302 - DNA, 20 bp, synthetic construct
  misc_feature 1..20: note = Description of Artificial Sequence: Synthetic primer
  source 1..20: mol_type = other DNA
gaatcggcgtggtagggagg

SEQ ID NO: 1303 - DNA, 26 bp, synthetic construct
  misc_feature 1..26: note = Description of Artificial Sequence: Synthetic primer
  source 1..26: mol_type = other DNA
aaccttcatcactcaaaacggtaaac

SEQ ID NO: 1304 - DNA, 26 bp, synthetic construct
  misc_feature 1..26: note = Description of Artificial Sequence: Synthetic primer
  source 1..26: mol_type = other DNA
tgaacgaagtgcttacaagagagttg

SEQ ID NO: 1305 - DNA, 24 bp, synthetic construct
  misc_feature 1..24: note = Description of Artificial Sequence: Synthetic primer
  source 1..24: mol_type = other DNA
gagtaaccctaacttcaactcccg

SEQ ID NO: 1306 - DNA, 27 bp, synthetic construct
  misc_feature 1..27: note = Description of Artificial Sequence: Synthetic primer
  source 1..27: mol_type = other DNA
aggaagtgaagttggaagaaagagcag

SEQ ID NO: 1307 - DNA, 25 bp, synthetic construct
  misc_feature 1..25: note = Description of Artificial Sequence: Synthetic primer
  source 1..25: mol_type = other DNA
accaaccatacatcttccttctggc

SEQ ID NO: 1308 - DNA, 27 bp, synthetic construct
  misc_feature 1..27: note = Description of Artificial Sequence: Synthetic primer
  source 1..27: mol_type = other DNA
gatctttctggattaaacgggaaactg

SEQ ID NO: 1309 - DNA, 26 bp, synthetic construct
  misc_feature 1..26: note = Description of Artificial Sequence: Synthetic primer
  source 1..26: mol_type = other DNA
gctgcatctaagcctcttgacattag

SEQ ID NO: 1310 - DNA, 30 bp, synthetic construct
  misc_feature 1..30: note = Description of Artificial Sequence: Synthetic primer
  source 1..30: mol_type = other DNA
tcgtgttaacatttcctttaaggtatgacg

SEQ ID NO: 1311 - DNA, 22 bp, synthetic construct
  misc_feature 1..22: note = Description of Artificial Sequence: Synthetic primer
  source 1..22: mol_type = other DNA
tccgggcatgtaaatcggatgc

SEQ ID NO: 1312 - DNA, 23 bp, synthetic construct
  misc_feature 1..23: note = Description of Artificial Sequence: Synthetic primer
  source 1..23: mol_type = other DNA
aagggacacgataaacttgctcc

SEQ ID NO: 1313 - DNA, 22 bp, synthetic construct
  misc_feature 1..22: note = Description of Artificial Sequence: Synthetic primer
  source 1..22: mol_type = other DNA
accaacttggaaccacaacagg

SEQ ID NO: 1314 - DNA, 25 bp, synthetic construct
  misc_feature 1..25: note = Description of Artificial Sequence: Synthetic primer
  source 1..25: mol_type = other DNA
gaggttcttcggtaggtattgcttg

SEQ ID NO: 1315 - DNA, 27 bp, synthetic construct
  misc_feature 1..27: note = Description of Artificial Sequence: Synthetic primer
  source 1..27: mol_type = other DNA
gcgcctgtagcaataaattttaatccg

SEQ ID NO: 1316 - DNA, 33 bp, synthetic construct
  misc_feature 1..33: note = Description of Artificial Sequence: Synthetic primer
  source 1..33: mol_type = other DNA
atccaaaaatttcgttgaatattaggttacctg

SEQ ID NO: 1317 - DNA, 22 bp, synthetic construct
  misc_feature 1..22: note = Description of Artificial Sequence: Synthetic primer
  source 1..22: mol_type = other DNA
gcgaagggattcagatgggttg

SEQ ID NO: 1318 - DNA, 20 bp, synthetic construct
  misc_feature 1..20: note = Description of Artificial Sequence: Synthetic primer
  source 1..20: mol_type = other DNA
acgctccttgcctcagtcac

SEQ ID NO: 1319 - DNA, 25 bp, synthetic construct
  misc_feature 1..25: note = Description of Artificial Sequence: Synthetic primer
  source 1..25: mol_type = other DNA
gctttggttaatcgatttgcggatc

SEQ ID NO: 1320 - DNA, 23 bp, synthetic construct
  misc_feature 1..23: note = Description of Artificial Sequence: Synthetic primer
  source 1..23: mol_type = other DNA
gacactgaatgaagctccgagtg

SEQ ID NO: 1321 - DNA, 24 bp, synthetic construct
  misc_feature 1..24: note = Description of Artificial Sequence: Synthetic primer
  source 1..24: mol_type = other DNA
gattttctcgaaccggaaatgtcg

SEQ ID NO: 1322 - DNA, 22 bp, synthetic construct
  misc_feature 1..22: note = Description of Artificial Sequence: Synthetic primer
  source 1..22: mol_type = other DNA
accccagatgacaccgaagatg

SEQ ID NO: 1323 - DNA, 24 bp, synthetic construct
  misc_feature 1..24: note = Description of Artificial Sequence: Synthetic primer
  source 1..24: mol_type = other DNA
agacacaataacgcccaagagatg

SEQ ID NO: 1324 - DNA, 22 bp, synthetic construct
  misc_feature 1..22: note = Description of Artificial Sequence: Synthetic primer
  source 1..22: mol_type = other DNA
tcatatacggatgctgcagctg

SEQ ID NO: 1325 - DNA, 21 bp, synthetic construct
  misc_feature 1..21: note = Description of Artificial Sequence: Synthetic primer
  source 1..21: mol_type = other DNA
gggcatgcagaagaagaccag

SEQ ID NO: 1326 - DNA, 22 bp, synthetic construct
  misc_feature 1..22: note = Description of Artificial Sequence: Synthetic primer
  source 1..22: mol_type = other DNA
caaaggtttgcttttcggctcc

SEQ ID NO: 1327 - DNA, 25 bp, synthetic construct
  misc_feature 1..25: note = Description of Artificial Sequence: Synthetic primer
  source 1..25: mol_type = other DNA
ttttcagcctataatgtgaagcacc

SEQ ID NO: 1328 - DNA, 26 bp, synthetic construct
  misc_feature 1..26: note = Description of Artificial Sequence: Synthetic primer
  source 1..26: mol_type = other DNA
gcatgggaaacagaaaattgagtttg

SEQ ID NO: 1329 - DNA, 23 bp, synthetic construct
  misc_feature 1..23: note = Description of Artificial Sequence: Synthetic primer
  source 1..23: mol_type = other DNA
aaagacggttctgctgatccttc

SEQ ID NO: 1330 - DNA, 23 bp, synthetic construct
  misc_feature 1..23: note = Description of Artificial Sequence: Synthetic primer
  source 1..23: mol_type = other DNA
cataaagaggctgcgatgaggag

SEQ ID NO: 1331 - DNA, 25 bp, synthetic construct
  misc_feature 1..25: note = Description of Artificial Sequence: Synthetic primer
  source 1..25: mol_type = other DNA
agtggaatattgggagtagtgtgtc

SEQ ID NO: 1332 - DNA, 24 bp, synthetic construct
  misc_feature 1..24: note = Description of Artificial Sequence: Synthetic primer
  source 1..24: mol_type = other DNA
caaattctgcaacctttccacact

SEQ ID NO: 1333 - DNA, 23 bp, synthetic construct
  misc_feature 1..23: note = Description of Artificial Sequence: Synthetic primer
  source 1..23: mol_type = other DNA
ccaaccaaagaagacatcgcatc

SEQ ID NO: 1334 - DNA, 27 bp, synthetic construct
  misc_feature 1..27: note = Description of Artificial Sequence: Synthetic primer
  source 1..27: mol_type = other DNA
tggctgcattcgtagatgttgaatttg

SEQ ID NO: 1335 - DNA, 29 bp, synthetic construct
  misc_feature 1..29: note = Description of Artificial Sequence: Synthetic primer
  source 1..29: mol_type = other DNA
agttatgtcgtctgtcatacaaaagtttg

SEQ ID NO: 1336 - DNA, 22 bp, synthetic construct
  misc_feature 1..22: note = Description of Artificial Sequence: Synthetic primer
  source 1..22: mol_type = other DNA
tgtagcattggagcatgttccg

SEQ ID NO: 1337 - DNA, 24 bp, synthetic construct
  misc_feature 1..24: note = Description of Artificial Sequence: Synthetic primer
  source 1..24: mol_type = other DNA
cgggactggtacactagaaacatc

SEQ ID NO: 1338 - DNA, 23 bp, synthetic construct
  misc_feature 1..23: note = Description of Artificial Sequence: Synthetic primer
  source 1..23: mol_type = other DNA
cagcaacaagcttctgaatgcca

SEQ ID NO: 1339 - DNA, 23 bp, synthetic construct
  misc_feature 1..23: note = Description of Artificial Sequence: Synthetic primer
  source 1..23: mol_type = other DNA
ggcagtgtctaagtgaaaggcga

SEQ ID NO: 1340 - DNA, 26 bp, synthetic construct
  misc_feature 1..26: note = Description of Artificial Sequence: Synthetic primer
  source 1..26: mol_type = other DNA
gctggtagagaatcattgattggctc

SEQ ID NO: 1341 - DNA, 29 bp, synthetic construct
  misc_feature 1..29: note = Description of Artificial Sequence: Synthetic primer
  source 1..29: mol_type = other DNA
tggttacttatcaatctttcagttcttgc

SEQ ID NO: 1342 - DNA, 29 bp, synthetic construct
  misc_feature 1..29: note = Description of Artificial Sequence: Synthetic primer
  source 1..29: mol_type = other DNA
tctttagtggatagtaaaatggtgggttc

SEQ ID NO: 1343 - DNA, 20 bp, synthetic construct
  misc_feature 1..20: note = Description of Artificial Sequence: Synthetic primer
  source 1..20: mol_type = other DNA
catcacgaacagcgcacctc

SEQ ID NO: 1344 - DNA, 25 bp, synthetic construct
  misc_feature 1..25: note = Description of Artificial Sequence: Synthetic primer
  source 1..25: mol_type = other DNA
tggtgacgttttggttgattctatg

SEQ ID NO: 1345 - DNA, 23 bp, synthetic construct
  misc_feature 1..23: note = Description of Artificial Sequence: Synthetic primer
  source 1..23: mol_type = other DNA
ctaaacagttcaacgactgcagg

SEQ ID NO: 1346 - DNA, 21 bp, synthetic construct
  misc_feature 1..21: note = Description of Artificial Sequence: Synthetic primer
  source 1..21: mol_type = other DNA
aacccgacgaatgtccaactc

SEQ ID NO: 1347 - DNA, 22 bp, synthetic construct
  misc_feature 1..22: note = Description of Artificial Sequence: Synthetic primer
  source 1..22: mol_type = other DNA
aggtaccctggcattctcttgc

SEQ ID NO: 1348 - DNA, 23 bp, synthetic construct
  misc_feature 1..23: note = Description of Artificial Sequence: Synthetic primer
  source 1..23: mol_type = other DNA
taaaccacaccctacgcgtatag

SEQ ID NO: 1349 - DNA, 25 bp, synthetic construct
  misc_feature 1..25: note = Description of Artificial Sequence: Synthetic primer
  source 1..25: mol_type = other DNA
acgcttcaacaaattggataatggg

SEQ ID NO: 1350 - DNA, 26 bp, synthetic construct
  misc_feature 1..26: note = Description of Artificial Sequence: Synthetic primer
  source 1..26: mol_type = other DNA
atgtgccatctttccaattttcatca

SEQ ID NO: 1351 - DNA, 27 bp, synthetic construct
  misc_feature 1..27: note = Description of Artificial Sequence: Synthetic primer
  source 1..27: mol_type = other DNA
ggaaatccaattcctgagtctctagtg

SEQ ID NO: 1352 - DNA, 25 bp, synthetic construct
  misc_feature 1..25: note = Description of Artificial Sequence: Synthetic primer
  source 1..25: mol_type = other DNA
agcaaaaatggtgaaagacagaacc

SEQ ID NO: 1353 - DNA, 28 bp, synthetic construct
  misc_feature 1..28: note = Description of Artificial Sequence: Synthetic primer
  source 1..28: mol_type = other DNA
ctgttttgctgctctttgaaaaatctac

SEQ ID NO: 1354 - DNA, 26 bp, synthetic construct
  misc_feature 1..26: note = Description of Artificial Sequence: Synthetic primer
  source 1..26: mol_type = other DNA
ccacttaaatagtttacgggcaagac

SEQ ID NO: 1355 - DNA, 20 bp, synthetic construct
  misc_feature 1..20: note = Description of Artificial Sequence: Synthetic primer
  source 1..20: mol_type = other DNA
tacttgtgtccccactgcgg

SEQ ID NO: 1356 - DNA, 32 bp, synthetic construct
  misc_feature 1..32: note = Description of Artificial Sequence: Synthetic primer
  source 1..32: mol_type = other DNA
gttttcttcaaacaacaaatgtctcttattcc

SEQ ID NO: 1357 - DNA, 24 bp, synthetic construct
  misc_feature 1..24: note = Description of Artificial Sequence: Synthetic primer
  source 1..24: mol_type = other DNA
cgaagatattgctcctccgaccac

SEQ ID NO: 1358 - DNA, 25 bp, synthetic construct
  misc_feature 1..25: note = Description of Artificial Sequence: Synthetic primer
  source 1..25: mol_type = other DNA
gttacttcacttgaacaccattccc

SEQ ID NO: 1359 - DNA, 21 bp, synthetic construct
  misc_feature 1..21: note = Description of Artificial Sequence: Synthetic primer
  source 1..21: mol_type = other DNA
caagaggagcatgcactacgg

SEQ ID NO: 1360 - DNA, 27 bp, synthetic construct
  misc_feature 1..27: note = Description of Artificial Sequence: Synthetic primer
  source 1..27: mol_type = other DNA
acacttttgaatctgtccatccatgac

SEQ ID NO: 1361 - DNA, 20 bp, synthetic construct
  misc_feature 1..20: note = Description of Artificial Sequence: Synthetic primer
  source 1..20: mol_type = other DNA
ttggagtctccgcgacaagc

SEQ ID NO: 1362 - DNA, 20 bp, synthetic construct
  misc_feature 1..20: note = Description of Artificial Sequence: Synthetic primer
  source 1..20: mol_type = other DNA
cccaggattacgcgatgcag

SEQ ID NO: 1363 - DNA, 26 bp, synthetic construct
  misc_feature 1..26: note = Description of Artificial Sequence: Synthetic primer
  source 1..26: mol_type = other DNA
gatggaattacacacaacctcagatg

SEQ ID NO: 1364 - DNA, 23 bp, synthetic construct
  misc_feature 1..23: note = Description of Artificial Sequence: Synthetic primer
  source 1..23: mol_type = other DNA
cgggtaaggatgtttaggtgcgt

SEQ ID NO: 1365 - DNA, 31 bp, synthetic construct
  misc_feature 1..31: note = Description of Artificial Sequence: Synthetic primer
  source 1..31: mol_type = other DNA
ccagcataaatttaagaatggagtagaatcc

SEQ ID NO: 1366 - DNA, 23 bp, synthetic construct
  misc_feature 1..23: note = Description of Artificial Sequence: Synthetic primer
  source 1..23: mol_type = other DNA
gacctggcattgacatgtccatg

SEQ ID NO: 1367 - DNA, 20 bp, synthetic construct
  misc_feature 1..20: note = Description of Artificial Sequence: Synthetic primer
  source 1..20: mol_type = other DNA
cctcgtagcttccgggagac

SEQ ID NO: 1368 - DNA, 26 bp, synthetic construct
  misc_feature 1..26: note = Description of Artificial Sequence: Synthetic primer
  source 1..26: mol_type = other DNA
aacgaagaggatgatatggaaaatgc

SEQ ID NO: 1369 - DNA, 22 bp, synthetic construct
  misc_feature 1..22: note = Description of Artificial Sequence: Synthetic primer
  source 1..22: mol_type = other DNA
atcgtcttctctcctccttccc

SEQ ID NO: 1370 - DNA, 26 bp, synthetic construct
  misc_feature 1..26: note = Description of Artificial Sequence: Synthetic primer
  source 1..26: mol_type = other DNA
agtcgagatattgaccaaatttgctc

SEQ ID NO: 1371 - DNA, 29 bp, synthetic construct
  misc_feature 1..29: note = Description of Artificial Sequence: Synthetic primer
  source 1..29: mol_type = other DNA
tgtacaacagaaagttcaattagatggag

SEQ ID NO: 1372 - DNA, 22 bp, synthetic construct
  misc_feature 1..22: note = Description of Artificial Sequence: Synthetic primer
  source 1..22: mol_type = other DNA
aatcaacacgttcgtgcaatcg

SEQ ID NO: 1373 - DNA, 24 bp, synthetic construct
  misc_feature 1..24: note = Description of Artificial Sequence: Synthetic primer
  source 1..24: mol_type = other DNA
gatgatctgttctggagttgttgc

SEQ ID NO: 1374 - DNA, 25 bp, synthetic construct
  misc_feature 1..25: note = Description of Artificial Sequence: Synthetic primer
  source 1..25: mol_type = other DNA
actaaagatctgaaggcacaagtgg

SEQ ID NO: 1375 - DNA, 28 bp, synthetic construct
  misc_feature 1..28: note = Description of Artificial Sequence: Synthetic primer
  source 1..28: mol_type = other DNA
gggaattgcgatggagtgaattttaagg

SEQ ID NO: 1376 - DNA, 22 bp, synthetic construct
  misc_feature 1..22: note = Description of Artificial Sequence: Synthetic primer
  source 1..22: mol_type = other DNA
tcattttcaagttgccgtcagc

SEQ ID NO: 1377 - DNA, 35 bp, synthetic construct
  misc_feature 1..35: note = Description of Artificial Sequence: Synthetic primer
  source 1..35: mol_type = other DNA
aacttcatcataagacctattaataatctgagttc

SEQ ID NO: 1378 - DNA, 26 bp, synthetic construct
  misc_feature 1..26: note = Description of Artificial Sequence: Synthetic primer
  source 1..26: mol_type = other DNA
cggagatattcaggaaccgtcaattg

SEQ ID NO: 1379 - DNA, 23 bp, synthetic construct
  misc_feature 1..23: note = Description of Artificial Sequence: Synthetic primer
  source 1..23: mol_type = other DNA
gccaggtgtttgggaatatgttc

SEQ ID NO: 1380 - DNA, 20 bp, synthetic construct
  misc_feature 1..20: note = Description of Artificial Sequence: Synthetic primer
  source 1..20: mol_type = other DNA
cagctgattcgaggggtctc

SEQ ID NO: 1381 - DNA, 28 bp, synthetic construct
  misc_feature 1..28: note = Description of Artificial Sequence: Synthetic primer
  source 1..28: mol_type = other DNA
accaactgaagaacaagtctgttagaac

SEQ ID NO: 1382 - DNA, 24 bp, synthetic construct
  misc_feature 1..24: note = Description of Artificial Sequence: Synthetic primer
  source 1..24: mol_type = other DNA
tgcaaaaaaggactcttcaaccag

SEQ ID NO: 1383 - DNA, 24 bp, synthetic construct
  misc_feature 1..24: note = Description of Artificial Sequence: Synthetic primer
  source 1..24: mol_type = other DNA
ggtctcattggcctttgaggattg

SEQ ID NO: 1384 - DNA, 29 bp, synthetic construct
  misc_feature 1..29: note = Description of Artificial Sequence: Synthetic primer
  source 1..29: mol_type = other DNA
ctagatcttaactgtgatgttctgagctg

SEQ ID NO: 1385 - DNA, 23 bp, synthetic construct
  misc_feature 1..23: note = Description of Artificial Sequence: Synthetic primer
  source 1..23: mol_type = other DNA
acgttgatctgactgatgatcgg

SEQ ID NO: 1386 - DNA, 28 bp, synthetic construct
  misc_feature 1..28: note = Description of Artificial Sequence: Synthetic primer
  source 1..28: mol_type = other DNA
ggtgatactaaagtggatttaaaaggcg

SEQ ID NO: 1387 - DNA, 21 bp, synthetic construct
  misc_feature 1..21: note = Description of Artificial Sequence: Synthetic primer
  source 1..21: mol_type = other DNA
accaacaacttcccctgcacc

SEQ ID NO: 1388 - DNA, 23 bp, synthetic construct
  misc_feature 1..23: note = Description of Artificial Sequence: Synthetic primer
  source 1..23: mol_type = other DNA
accgtcattggtacagttgatcc

SEQ ID NO: 1389 - DNA, 25 bp, synthetic construct
  misc_feature 1..25: note = Description of Artificial Sequence: Synthetic primer
  source 1..25: mol_type = other DNA
ccaccaaaacttacgtagcctactc

SEQ ID NO: 1390 - DNA, 25 bp, synthetic construct
  misc_feature 1..25: note = Description of Artificial Sequence: Synthetic primer
  source 1..25: mol_type = other DNA
aagtatcctacgtcaacaagcttcg

SEQ ID NO: 1391 - DNA, 26 bp, synthetic construct
  misc_feature 1..26: note = Description of Artificial Sequence: Synthetic primer
  source 1..26: mol_type = other DNA
tgaatctacttatgcttcttggggtg

SEQ ID NO: 1392 - DNA, 28 bp, synthetic construct
  misc_feature 1..28: note = Description of Artificial Sequence: Synthetic primer
  source 1..28: mol_type = other DNA
tgtcttgatcttctgaagtctcacttac

SEQ ID NO: 1393 - DNA, 20 bp, synthetic construct
  misc_feature 1..20: note = Description of Artificial Sequence: Synthetic primer
  source 1..20: mol_type = other DNA
ccgagctgggcagtctagag

SEQ ID NO: 1394 - DNA, 23 bp, synthetic construct
  misc_feature 1..23: note = Description of Artificial Sequence: Synthetic primer
  source 1..23: mol_type = other DNA
tggtggcattgttcaggtgattg

SEQ ID NO: 1395 - DNA, 32 bp, synthetic construct
  misc_feature 1..32: note = Description of Artificial Sequence: Synthetic primer
  source 1..32: mol_type = other DNA
agaaatcgacatgataagttgtttaaaacatc

SEQ ID NO: 1396 - DNA, 27 bp, synthetic construct
  misc_feature 1..27: note = Description of Artificial Sequence: Synthetic primer
  source 1..27: mol_type = other DNA
tgggaaaatctaatcgacgattacaac

SEQ ID NO: 1397 - DNA, 20 bp, synthetic construct
  misc_feature 1..20: note = Description of Artificial Sequence: Synthetic primer
  source 1..20: mol_type = other DNA
ggcggcgtagttgatggaag

SEQ ID NO: 1398 - DNA, 24 bp, synthetic construct
  misc_feature 1..24: note = Description of Artificial Sequence: Synthetic primer
  source 1..24: mol_type = other DNA
ggggattttggtaagagattgggc

SEQ ID NO: 1399 - DNA, 24 bp, synthetic construct
  misc_feature 1..24: note = Description of Artificial Sequence: Synthetic primer
  source 1..24: mol_type = other DNA
cacagtgactcaagaatccaccag

SEQ ID NO: 1400 - DNA, 28 bp, synthetic construct
  misc_feature 1..28: note = Description of Artificial Sequence: Synthetic primer
  source 1..28: mol_type = other DNA
tatctgttagtccaccaacatgactatg

SEQ ID NO: 1401 - DNA, 27 bp, synthetic construct
  misc_feature 1..27: note = Description of Artificial Sequence: Synthetic primer
  source 1..27: mol_type = other DNA
caagctggcaaaagtatcttcagtttc

SEQ ID NO: 1402 - DNA, 34 bp, synthetic construct
  misc_feature 1..34: note = Description of Artificial Sequence: Synthetic primer
  source 1..34: mol_type = other DNA
taacgaaattttaaccatcatagaaatgacttcc

SEQ ID NO: 1403 - DNA, 28 bp, synthetic construct
  misc_feature 1..28: note = Description of Artificial Sequence: Synthetic primer
  source 1..28: mol_type = other DNA
tgggtcccactataagaaattgaattcc

SEQ ID NO: 1404 - DNA, 26 bp, synthetic construct
  misc_feature 1..26: note = Description of Artificial Sequence: Synthetic primer
  source 1..26: mol_type = other DNA
ggatttttatgtggcagttgctagac

SEQ ID NO: 1405 - DNA, 30 bp, synthetic construct
  misc_feature 1..30: note = Description of Artificial Sequence: Synthetic primer
  source 1..30: mol_type = other DNA
acataaatgtaacgaaagaaactgcaaaag

SEQ ID NO: 1406 - DNA, 25 bp, synthetic construct
  misc_feature 1..25: note = Description of Artificial Sequence: Synthetic primer
  source 1..25: mol_type = other DNA
gtgctttgctagtagtttgaaggag

SEQ ID NO: 1407 - DNA, 27 bp, synthetic construct
  misc_feature 1..27: note = Description of Artificial Sequence: Synthetic primer
  source 1..27: mol_type = other DNA
cagcccattacaaaaagaatcaaaccc

SEQ ID NO: 1408 - DNA, 28 bp, synthetic construct
  misc_feature 1..28: note = Description of Artificial Sequence: Synthetic primer
  source 1..28: mol_type = other DNA
caatgtaacaatgaggtaattcaacagc

SEQ ID NO: 1409 - DNA, 34 bp, synthetic construct
  misc_feature 1..34: note = Description of Artificial Sequence: Synthetic primer
  source 1..34: mol_type = other DNA
tctttataagaaatcgctttaatttttgtacagg

SEQ ID NO: 1410 - DNA, 23 bp, synthetic construct
  misc_feature 1..23: note = Description of Artificial Sequence: Synthetic primer
  source 1..23: mol_type = other DNA
taccttctggatccttaacgctg

SEQ ID NO: 1411 - DNA, 20 bp, synthetic construct
  misc_feature 1..20: note = Description of Artificial Sequence: Synthetic primer
  source 1..20: mol_type = other DNA
acctgatgagttggcgcagg

SEQ ID NO: 1412 - DNA, 22 bp, synthetic construct
  misc_feature 1..22: note = Description of Artificial Sequence: Synthetic primer
  source 1..22: mol_type = other DNA
aacgtttcattcacccgtaccc

SEQ ID NO: 1413 - DNA, 20 bp, synthetic construct
  misc_feature 1..20: note = Description of Artificial Sequence: Synthetic primer
  source 1..20: mol_type = other DNA
acggcggagttgattcggag

SEQ ID NO: 1414 - DNA, 30 bp, synthetic construct
  misc_feature 1..30: note = Description of Artificial Sequence: Synthetic primer
  source 1..30: mol_type = other DNA
attttactgtctatatacaccattcactgc

SEQ ID NO: 1415 - DNA, 25 bp, synthetic construct
  misc_feature 1..25: note = Description of Artificial Sequence: Synthetic primer
  source 1..25: mol_type = other DNA
gatcatggaagatggtaacgcagtc

SEQ ID NO: 1416 - DNA, 24 bp, synthetic construct
  misc_feature 1..24: note = Description of Artificial Sequence: Synthetic primer
  source 1..24: mol_type = other DNA
ttgcagatttgggatagttagggc

SEQ ID NO: 1417 - DNA, 23 bp, synthetic construct
  misc_feature 1..23: note = Description of Artificial Sequence: Synthetic primer
  source 1..23: mol_type = other DNA
catgatcatccaccaccacctcc

SEQ ID NO: 1418 - DNA, 23 bp, synthetic construct
  misc_feature 1..23: note = Description of Artificial Sequence: Synthetic primer
  source 1..23: mol_type = other DNA
gcatcatacagttgatcgtgggg

SEQ ID NO: 1419 - DNA, 25 bp, synthetic construct
  misc_feature 1..25: note = Description of Artificial Sequence: Synthetic primer
  source 1..25: mol_type = other DNA
atgactgcatgcaagatacaaaagg

SEQ ID NO: 1420 - DNA, 29 bp, synthetic construct
  misc_feature 1..29: note = Description of Artificial Sequence: Synthetic primer
  source 1..29: mol_type = other DNA
attgataacgagaacaacgatcttttctc

SEQ ID NO: 1421 - DNA, 25 bp, synthetic construct
  misc_feature 1..25: note = Description of Artificial Sequence: Synthetic primer
  source 1..25: mol_type = other DNA
gacacatctcgtatatcaaggcctg

SEQ ID NO: 1422 - DNA, 25 bp, synthetic construct
  misc_feature 1..25: note = Description of Artificial Sequence: Synthetic primer
  source 1..25: mol_type = other DNA
gaaagagaggaaattgtggcttgtg

SEQ ID NO: 1423 - DNA, 25 bp, synthetic construct
  misc_feature 1..25: note = Description of Artificial Sequence: Synthetic primer
  source 1..25: mol_type = other DNA
cggtttttagcagttctttttgggg

SEQ ID NO: 1424 - DNA, 23 bp, synthetic construct
  misc_feature 1..23: note = Description of Artificial Sequence: Synthetic primer
  source 1..23: mol_type = other DNA
ttggggcttatttacagaggagc

SEQ ID NO: 1425 - DNA, 23 bp, synthetic construct
  misc_feature 1..23: note = Description of Artificial Sequence: Synthetic primer
  source 1..23: mol_type = other DNA
tggcttcaattctaccgcaactc

SEQ ID NO: 1426 - DNA, 24 bp, synthetic construct
  misc_feature 1..24: note = Description of Artificial Sequence: Synthetic primer
  source 1..24: mol_type = other DNA
tcaccggaaagaccatcactcttg

SEQ ID NO: 1427 - DNA, 31 bp, synthetic construct
  misc_feature 1..31: note = Description of Artificial Sequence: Synthetic primer
  source 1..31: mol_type = other DNA
ccttgtcttgaatcttagctttgacattatc

SEQ ID NO: 1428 - DNA, 28 bp, synthetic construct
  misc_feature 1..28: note = Description of Artificial Sequence: Synthetic primer
  source 1..28: mol_type = other DNA
aaactcatgaatttaagcttgttcaagc

SEQ ID NO: 1429 - DNA, 23 bp, synthetic construct
  misc_feature 1..23: note = Description of Artificial Sequence: Synthetic primer
  source 1..23: mol_type = other DNA
acagggactctaatttcacgacc

SEQ ID NO: 1430 - DNA, 27 bp, synthetic construct
  misc_feature 1..27: note = Description of Artificial Sequence: Synthetic primer
  source 1..27: mol_type = other DNA
tgtcagtaggatggtacttgttaggac

SEQ ID NO: 1431 - DNA, 24 bp, synthetic construct
  misc_feature 1..24: note = Description of Artificial Sequence: Synthetic primer
  source 1..24: mol_type = other DNA
ttgctcttatgatcatgagacgcg

SEQ ID NO: 1432 - DNA, 22 bp, synthetic construct
  misc_feature 1..22: note = Description of Artificial Sequence: Synthetic primer
  source 1..22: mol_type = other DNA
atcaagcagcaagaacaagtgc

SEQ ID NO: 1433 - DNA, 24 bp, synthetic construct
  misc_feature 1..24: note = Description of Artificial Sequence: Synthetic primer
  source 1..24: mol_type = other DNA
gtgacagcccaaccattgttacag

SEQ ID NO: 1434 - DNA, 23 bp, synthetic construct
  misc_feature 1..23: note = Description of Artificial Sequence: Synthetic primer
  source 1..23: mol_type = other DNA
ccattctaagcagcaaccacctc

SEQ ID NO: 1435 - DNA, 22 bp, synthetic construct
  misc_feature 1..22: note = Description of Artificial Sequence: Synthetic primer
  source 1..22: mol_type = other DNA
tgcagctacatcatggttggag

SEQ ID NO: 1436 - DNA, 26 bp, synthetic construct
  misc_feature 1..26: note = Description of Artificial Sequence: Synthetic primer
  source 1..26: mol_type = other DNA
taattgtttctctgtgtcacggactg

SEQ ID NO: 1437 - DNA, 24 bp, synthetic construct
  misc_feature 1..24: note = Description of Artificial Sequence: Synthetic primer
  source 1..24: mol_type = other DNA
caagatgtggacgagcaatttgac

SEQ ID NO: 1438 - DNA, 25 bp, synthetic construct
  misc_feature 1..25: note = Description of Artificial Sequence: Synthetic primer
  source 1..25: mol_type = other DNA
ggagcaaaaattgggtttaaacacc

SEQ ID NO: 1439 - DNA, 26 bp, synthetic construct
  misc_feature 1..26: note = Description of Artificial Sequence: Synthetic primer
  source 1..26: mol_type = other DNA
ttgctcttcagtttcggccttttaag

SEQ ID NO: 1440 - DNA, 22 bp, synthetic construct
  misc_feature 1..22: note = Description of Artificial Sequence: Synthetic primer
  source 1..22: mol_type = other DNA
ccaacacagtggcatcagcatg

SEQ ID NO: 1441 - DNA, 23 bp, synthetic construct
  misc_feature 1..23: note = Description of Artificial Sequence: Synthetic primer
  source 1..23: mol_type = other DNA
gggagtagcttgtccagggaatc

SEQ ID NO: 1442 - DNA, 23 bp, synthetic construct
  misc_feature 1..23: note = Description of Artificial Sequence: Synthetic primer
  source 1..23: mol_type = other DNA
tgtctctgatggcctaaggaaac

SEQ ID NO: 1443 - DNA, 24 bp, synthetic construct
  misc_feature 1..24: note = Description of Artificial Sequence: Synthetic primer
  source 1..24: mol_type = other DNA
gctggaacttttctggtccatcac

SEQ ID NO: 1444 - DNA, 31 bp, synthetic construct
  misc_feature 1..31: note = Description of Artificial Sequence: Synthetic primer
  source 1..31: mol_type = other DNA
cactcattatagttatcattccacacatcat

SEQ ID NO: 1445 - DNA, 25 bp, synthetic construct
  misc_feature 1..25: note = Description of Artificial Sequence: Synthetic primer
  source 1..25: mol_type = other DNA
aggtcaattgaaagaaagcccgaag

SEQ ID NO: 1446 - DNA, 30 bp, synthetic construct
  misc_feature 1..30: note = Description of Artificial Sequence: Synthetic primer
  source 1..30: mol_type = other DNA
tgtgatttcacctctggaataattttcttg

SEQ ID NO: 1447 - DNA, 25 bp, synthetic construct
  misc_feature 1..25: note = Description of Artificial Sequence: Synthetic primer
  source 1..25: mol_type = other DNA
atgacccagcgttttgttgaatctc

SEQ ID NO: 1448 - DNA, 25 bp, synthetic construct
  misc_feature 1..25: note = Description of Artificial Sequence: Synthetic primer
  source 1..25: mol_type = other DNA
gtcggcacatgtcctattacagagg

SEQ ID NO: 1449 - DNA, 29 bp, synthetic construct
  misc_feature 1..29: note = Description of Artificial Sequence: Synthetic primer
  source 1..29: mol_type = other DNA
tctgattcagagagttgtttcaatttctc

SEQ ID NO: 1450 - DNA, 24 bp, synthetic construct
  misc_feature 1..24: note = Description of Artificial Sequence: Synthetic primer
  source 1..24: mol_type = other DNA
gcatctgtatgtgtgtggtacatg

SEQ ID NO: 1451 - DNA, 29 bp, synthetic construct
  misc_feature 1..29: note = Description of Artificial Sequence: Synthetic primer
  source 1..29: mol_type = other DNA
ttggagtagtctcactgtcatctaaattg

SEQ ID NO: 1452 - DNA, 21 bp, synthetic construct
  misc_feature 1..21: note = Description of Artificial Sequence: Synthetic primer
  source 1..21: mol_type = other DNA
cctattgtccaggtggccaac

SEQ ID NO: 1453 - DNA, 25 bp, synthetic construct
  misc_feature 1..25: note = Description of Artificial Sequence: Synthetic primer
  source 1..25: mol_type = other DNA
acgtaaaggagctgatacctaactg

SEQ ID NO: 1454 - DNA, 23 bp, synthetic construct
  misc_feature 1..23: note = Description of Artificial Sequence: Synthetic primer
  source 1..23: mol_type = other DNA
ggaggactttacccctaccttgg

SEQ ID NO: 1455 - DNA, 29 bp, synthetic construct
  misc_feature 1..29: note = Description of Artificial Sequence: Synthetic primer
  source 1..29: mol_type = other DNA
catcttttcaagttagttttgagccgagg

SEQ ID NO: 1456 - DNA, 26 bp, synthetic construct
  misc_feature 1..26: note = Description of Artificial Sequence: Synthetic primer
  source 1..26: mol_type = other DNA
tgtcctccaagtttatgtgataaccc

SEQ ID NO: 1457 - DNA, 27 bp, synthetic construct
  misc_feature 1..27: note = Description of Artificial Sequence: Synthetic primer
  source 1..27: mol_type = other DNA
gtggtcacagtttgcaacactatgaag

SEQ ID NO: 1458 - DNA, 24 bp, synthetic construct
  misc_feature 1..24: note = Description of Artificial Sequence: Synthetic primer
  source 1..24: mol_type = other DNA
gcctttgcgaatactggaattgag

SEQ ID NO: 1459 - DNA, 25 bp, synthetic construct
  misc_feature 1..25: note = Description of Artificial Sequence: Synthetic primer
  source 1..25: mol_type = other DNA
ttgagaaaacgccaacaagtctgag

SEQ ID NO: 1460 - DNA, 29 bp, synthetic construct
  misc_feature 1..29: note = Description of Artificial Sequence: Synthetic primer
  source 1..29: mol_type = other DNA
atgggcaaagctacgtttgattttatatg

SEQ ID NO: 1461 - DNA, 26 bp, synthetic construct
  misc_feature 1..26: note = Description of Artificial Sequence: Synthetic primer
  source 1..26: mol_type = other DNA
catcgtgtccttttttgtcactactg

SEQ ID NO: 1462 - DNA, 29 bp, synthetic construct
  misc_feature 1..29: note = Description of Artificial Sequence: Synthetic primer
  source 1..29: mol_type = other DNA
gtcgacccatatttcgtatttatggacag

SEQ ID NO: 1463 - DNA, 23 bp, synthetic construct
  misc_feature 1..23: note = Description of Artificial Sequence: Synthetic primer
  source 1..23: mol_type = other DNA
tgagaacaagcttttcggagacc

SEQ ID NO: 1464 - DNA, 20 bp, synthetic construct
  misc_feature 1..20: note = Description of Artificial Sequence: Synthetic primer
  source 1..20: mol_type = other DNA
tccacctccacctccacctc

SEQ ID NO: 1465 - DNA, 28 bp, synthetic construct
  misc_feature 1..28: note = Description of Artificial Sequence: Synthetic primer
  source 1..28: mol_type = other DNA
cggttagagaaaaatcttccttcacatg

SEQ ID NO: 1466 - DNA, 23 bp, synthetic construct
  misc_feature 1..23: note = Description of Artificial Sequence: Synthetic primer
  source 1..23: mol_type = other DNA
acgaagttatggcaagcaaaacg

SEQ ID NO: 1467 - DNA, 25 bp, synthetic construct
  misc_feature 1..25: note = Description of Artificial Sequence: Synthetic primer
  source 1..25: mol_type = other DNA
agctactttttcgaacaattcaccg

SEQ ID NO: 1468 - DNA, 25 bp, synthetic construct
  misc_feature 1..25: note = Description of Artificial Sequence: Synthetic primer
  source 1..25: mol_type = other DNA
cttggtccttcattcacttgagatg

SEQ ID NO: 1469 - DNA, 22 bp, synthetic construct
  misc_feature 1..22: note = Description of Artificial Sequence: Synthetic primer
  source 1..22: mol_type = other DNA
agcagaagtcgaggaagtggag

SEQ ID NO: 1470 - DNA, 23 bp, synthetic construct
  misc_feature 1..23: note = Description of Artificial Sequence: Synthetic primer
  source 1..23: mol_type = other DNA
ggacgaggtcaataacaacgagc

SEQ ID NO: 1471 - DNA, 26 bp, synthetic construct
  misc_feature 1..26: note = Description of Artificial Sequence: Synthetic primer
  source 1..26: mol_type = other DNA
tttttcactctgatcccaaacgttac

SEQ ID NO: 1472 - DNA, 24 bp, synthetic construct
  misc_feature 1..24: note = Description of Artificial Sequence: Synthetic primer
  source 1..24: mol_type = other DNA
acaagccttataagacgcaactcg

SEQ ID NO: 1473 - DNA, 26 bp, synthetic construct
  misc_feature 1..26: note = Description of Artificial Sequence: Synthetic primer
  source 1..26: mol_type = other DNA
aacattttcggatatggcaatggaac

SEQ ID NO: 1474 - DNA, 21 bp, synthetic construct
  misc_feature 1..21: note = Description of Artificial Sequence: Synthetic primer
  source 1..21: mol_type = other DNA
tcctggttccttgctgctgtg

SEQ ID NO: 1475 - DNA, 26 bp, synthetic construct
  misc_feature 1..26: note = Description of Artificial Sequence: Synthetic primer
  source 1..26: mol_type = other DNA
ttgccaaacaagagtataagttccac

SEQ ID NO: 1476 - DNA, 31 bp, synthetic construct
  misc_feature 1..31: note = Description of Artificial Sequence: Synthetic primer
  source 1..31: mol_type = other DNA
gctacaacttttcttactttccagtatcctc

SEQ ID NO: 1477 - DNA, 24 bp, synthetic construct
  misc_feature 1..24: note = Description of Artificial Sequence: Synthetic primer
  source 1..24: mol_type = other DNA
ccgaatcagacgttaaatctcggg

SEQ ID NO: 1478 - DNA, 21 bp, synthetic construct
  misc_feature 1..21: note = Description of Artificial Sequence: Synthetic primer
  source 1..21: mol_type = other DNA
tgatcagctgctaaacacgcg

SEQ ID NO: 1479 - DNA, 32 bp, synthetic construct
  misc_feature 1..32: note = Description of Artificial Sequence: Synthetic primer
  source 1..32: mol_type = other DNA
gtactcgaaagtgaataatctgaaatgttacc

SEQ ID NO: 1480 - DNA, 23 bp, synthetic construct
  misc_feature 1..23: note = Description of Artificial Sequence: Synthetic primer
  source 1..23: mol_type = other DNA
tgttgaacagatcatcacgggtc

SEQ ID NO: 1481 - DNA, 22 bp, synthetic construct
  misc_feature 1..22: note = Description of Artificial Sequence: Synthetic primer
  source 1..22: mol_type = other DNA
attattccagctggtgtgccac

SEQ ID NO: 1482 - DNA, 24 bp, synthetic construct
  misc_feature 1..24: note = Description of Artificial Sequence: Synthetic primer
  source 1..24: mol_type = other DNA
agatctggaagaagcctacttgtg

SEQ ID NO: 1483 - DNA, 27 bp, synthetic construct
  misc_feature 1..27: note = Description of Artificial Sequence: Synthetic primer
  source 1..27: mol_type = other DNA
cagtctcagtatctgtacctggtaaag

SEQ ID NO: 1484 - DNA, 22 bp, synthetic construct
  misc_feature 1..22: note = Description of Artificial Sequence: Synthetic primer
  source 1..22: mol_type = other DNA
ttggtagtgaagttgaggcctc

SEQ ID NO: 1485 - DNA, 28 bp, synthetic construct
  misc_feature 1..28: note = Description of Artificial Sequence: Synthetic primer
  source 1..28: mol_type = other DNA
tgaggtatgttaagaatcgggtttgatg

SEQ ID NO: 1486 - DNA, 27 bp, synthetic construct
  misc_feature 1..27: note = Description of Artificial Sequence: Synthetic primer
  source 1..27: mol_type = other DNA
tgcatggctattttccgtcatctaagg

SEQ ID NO: 1487 - DNA, 21 bp, synthetic construct
  misc_feature 1..21: note = Description of Artificial Sequence: Synthetic primer
  source 1..21: mol_type = other DNA
ggttgcaccgtgatcacttgg

SEQ ID NO: 1488 - DNA, 30 bp, synthetic construct
  misc_feature 1..30: note = Description of Artificial Sequence: Synthetic primer
  source 1..30: mol_type = other DNA
tcaaatcgacaaacaatacatatctggtta

SEQ ID NO: 1489 - DNA, 20 bp, synthetic construct
  misc_feature 1..20: note = Description of Artificial Sequence: Synthetic primer
  source 1..20: mol_type = other DNA
aaccctcgtctgtcagtggc

SEQ ID NO: 1490 - DNA, 24 bp, synthetic construct
  misc_feature 1..24: note = Description of Artificial Sequence: Synthetic primer
  source 1..24: mol_type = other DNA
tgaagccagttgacactactgaag

SEQ ID NO: 1491 - DNA, 19 bp, synthetic construct
  misc_feature 1..19: note = Description of Artificial Sequence: Synthetic primer
  source 1..19: mol_type = other DNA
gagagaccggccagcattg

SEQ ID NO: 1492 - DNA, 24 bp, synthetic construct
  misc_feature 1..24: note = Description of Artificial Sequence: Synthetic primer
  source 1..24: mol_type = other DNA
gcaggacatccaagaagagcaaag

SEQ ID NO: 1493 - DNA, 29 bp, synthetic construct
  misc_feature 1..29: note = Description of Artificial Sequence: Synthetic primer
  source 1..29: mol_type = other DNA
tgtcaataatgcaccaattacaagtgaag

SEQ ID NO: 1494 - DNA, 25 bp, synthetic construct
  misc_feature 1..25: note = Description of Artificial Sequence: Synthetic primer
  source 1..25: mol_type = other DNA
aaggtagtccgagtcaaactgtatc

SEQ ID NO: 1495 - DNA, 28 bp, synthetic construct
  misc_feature 1..28: note = Description of Artificial Sequence: Synthetic primer
  source 1..28: mol_type = other DNA
tctgggtttgtaatggaacttcatatgg

SEQ ID NO: 1496 - DNA, 27 bp, synthetic construct
  misc_feature 1..27: note = Description of Artificial Sequence: Synthetic primer
  source 1..27: mol_type = other DNA
gcataacagccatgaacttgatgaaac

SEQ ID NO: 1497 - DNA, 21 bp, synthetic construct
  misc_feature 1..21: note = Description of Artificial Sequence: Synthetic primer
  source 1..21: mol_type = other DNA
gacttggtgttcgtttgagcc

SEQ ID NO: 1498 - DNA, 30 bp, synthetic construct
  misc_feature 1..30: note = Description of Artificial Sequence: Synthetic primer
  source 1..30: mol_type = other DNA
cagaaaatcaattgtgttctctcaattcag

SEQ ID NO: 1499 - DNA, 24 bp, synthetic construct
  misc_feature 1..24: note = Description of Artificial Sequence: Synthetic primer
  source 1..24: mol_type = other DNA
gctttaagcggctcttcaagtagg

SEQ ID NO: 1500 - DNA, 25 bp, synthetic construct
  misc_feature 1..25: note = Description of Artificial Sequence: Synthetic primer
  source 1..25: mol_type = other DNA
ttcaaagcacgccaaagaattagtg

SEQ ID NO: 1501 - DNA, 27 bp, synthetic construct
  misc_feature 1..27: note = Description of Artificial Sequence: Synthetic primer
  source 1..27: mol_type = other DNA
accttctctatcaaagtatggatgtgc

SEQ ID NO: 1502 - DNA, 25 bp, synthetic construct
  misc_feature 1..25: note = Description of Artificial Sequence: Synthetic primer
  source 1..25: mol_type = other DNA
ctgcctgaatgtcatcaaacatgtg

SEQ ID NO: 1503 - DNA, 35 bp, synthetic construct
  misc_feature 1..35: note = Description of Artificial Sequence: Synthetic primer
  source 1..35: mol_type = other DNA
acagatgtatacatatatatttcatgctaacaagg

SEQ ID NO: 1504 - DNA, 22 bp, synthetic construct
  misc_feature 1..22: note = Description of Artificial Sequence: Synthetic primer
  source 1..22: mol_type = other DNA
atgggcactaagctgtcacatc

SEQ ID NO: 1505 - DNA, 22 bp, synthetic construct
  misc_feature 1..22: note = Description of Artificial Sequence: Synthetic primer
  source 1..22: mol_type = other DNA
gccaacacgttgaacattggac

SEQ ID NO: 1506 - DNA, 24 bp, synthetic construct
  misc_feature 1..24: note = Description of Artificial Sequence: Synthetic primer
  source 1..24: mol_type = other DNA
agtcccatagtttattccgacacc

SEQ ID NO: 1507 - DNA, 28 bp, synthetic construct
  misc_feature 1..28: note = Description of Artificial Sequence: Synthetic primer
  source 1..28: mol_type = other DNA
tcttgtcttatccctcttcattctcctc

SEQ ID NO: 1508 - DNA, 26 bp, synthetic construct
  misc_feature 1..26: note = Description of Artificial Sequence: Synthetic primer
  source 1..26: mol_type = other DNA
tagtgactattctgacggcttaaacc

SEQ ID NO: 1509 - DNA, 26 bp, synthetic construct
  misc_feature 1..26: note = Description of Artificial Sequence: Synthetic primer
  source 1..26: mol_type = other DNA
aaaggagcatcgaagcaacagtaaag

SEQ ID NO: 1510 - DNA, 26 bp, synthetic construct
  misc_feature 1..26: note = Description of Artificial Sequence: Synthetic primer
  source 1..26: mol_type = other DNA
gaactgctaggaacatctgacacttc

SEQ ID NO: 1511 - DNA, 25 bp, synthetic construct
  misc_feature 1..25: note = Description of Artificial Sequence: Synthetic primer
  source 1..25: mol_type = other DNA
tcatgaccaaaaagaaagatgtggg

SEQ ID NO: 1512 - DNA, 24 bp, synthetic construct
  misc_feature 1..24: note = Description of Artificial Sequence: Synthetic primer
  source 1..24: mol_type = other DNA
aaccatcttcttcggtaacccaac

SEQ ID NO: 1513 - DNA, 22 bp, synthetic construct
  misc_feature 1..22: note = Description of Artificial Sequence: Synthetic primer
  source 1..22: mol_type = other DNA
aagcagatgcaccggcaatact

SEQ ID NO: 1514 - DNA, 22 bp, synthetic construct
  misc_feature 1..22: note = Description of Artificial Sequence: Synthetic primer
  source 1..22: mol_type = other DNA
gcagagtccaatccagaggatg

SEQ ID NO: 1515 - DNA, 29 bp, synthetic construct
  misc_feature 1..29: note = Description of Artificial Sequence: Synthetic primer
  source 1..29: mol_type = other DNA
gtcatctgatgttgattgtctaacaagtg

SEQ ID NO: 1516 - DNA, 21 bp, synthetic construct
  misc_feature 1..21: note = Description of Artificial Sequence: Synthetic primer
  source 1..21: mol_type = other DNA
cagctcagcaacagttcgtcc

SEQ ID NO: 1517 - DNA, 23 bp, synthetic construct
  misc_feature 1..23: note = Description of Artificial Sequence: Synthetic primer
  source 1..23: mol_type = other DNA
agcagaagactgaagagctgagc

SEQ ID NO: 1518 - DNA, 28 bp, synthetic construct
  misc_feature 1..28: note = Description of Artificial Sequence: Synthetic primer
  source 1..28: mol_type = other DNA
acatctttcgaaaacttccaccttgatc

SEQ ID NO: 1519 - DNA, 28 bp, synthetic construct
  misc_feature 1..28: note = Description of Artificial Sequence: Synthetic primer
  source 1..28: mol_type = other DNA
gcatcaagagttttaaccacttgaatcc

SEQ ID NO: 1520 - DNA, 20 bp, synthetic construct
  misc_feature 1..20: note = Description of Artificial Sequence: Synthetic primer
  source 1..20: mol_type = other DNA
gggcgaaggtcctgaatcag

SEQ ID NO: 1521 - DNA, 20 bp, synthetic construct
  misc_feature 1..20: note = Description of Artificial Sequence: Synthetic primer
  source 1..20: mol_type = other DNA
gcagaccctttgcctccagc

SEQ ID NO: 1522 - DNA, 29 bp, synthetic construct
  misc_feature 1..29: note = Description of Artificial Sequence: Synthetic primer
  source 1..29: mol_type = other DNA
gtgtctgcactattcatattttgattcga

SEQ ID NO: 1523 - DNA, 26 bp, synthetic construct
  misc_feature 1..26: note = Description of Artificial Sequence: Synthetic primer
  source 1..26: mol_type = other DNA
gtcaagaaatccaactgtatggcttg

SEQ ID NO: 1524 - DNA, 23 bp, synthetic construct
  misc_feature 1..23: note = Description of Artificial Sequence: Synthetic primer
  source 1..23: mol_type = other DNA
tgcccatacgatttaaggttgcg

SEQ ID NO: 1525 - DNA, 23 bp, synthetic construct
  misc_feature 1..23: note = Description of Artificial Sequence: Synthetic primer
  source 1..23: mol_type = other DNA
caggtgcaaccattgttaccgtg

SEQ ID NO: 1526 - DNA, 23 bp, synthetic construct
  misc_feature 1..23: note = Description of Artificial Sequence: Synthetic primer
  source 1..23: mol_type = other DNA
ccccaacctaggtgagagaactc

SEQ ID NO: 1527 - DNA, 23 bp, synthetic construct
  misc_feature 1..23: note = Description of Artificial Sequence: Synthetic primer
  source 1..23: mol_type = other DNA
tccttcacatcctgcaaacgtcc

SEQ ID NO: 1528 - DNA, 22 bp, synthetic construct
  misc_feature 1..22: note = Description of Artificial Sequence: Synthetic primer
  source 1..22: mol_type = other DNA
ttacgcacacgccatgggttag

SEQ ID NO: 1529 - DNA, 19 bp, synthetic construct
  misc_feature 1..19: note = Description of Artificial Sequence: Synthetic primer
  source 1..19: mol_type = other DNA
cgtgacgtgggcctaaacc